(19) United States
(12) Patent Application Publication
(10) Pub. No.: US 2026/0159603 A1
(43) Pub. Date: Jun. 11, 2026

(54) CD5-BINDING POLYPEPTIDES, COMPOSITIONS COMPRISING THE SAME, AND METHODS FOR USE THEREOF

(71) Applicant: Beam Therapeutics Inc., Cambridge, MA (US)

(72) Inventor: Shawn Jennings, Cambridge, MA (US)

(73) Assignee: Beam Therapeutics Inc., Cambridge, MA (US)

(21) Appl. No.: 19/468,887

(22) Filed: Feb. 3, 2026

Related U.S. Application Data
(63) Continuation of application No. PCT/US2024/042423, filed on Aug. 15, 2024.
(60) Provisional application No. 63/520,065, filed on Aug. 16, 2023.
(60) Provisional application No. 63/592,339, filed on Oct. 23, 2023.

(51) Int. Cl. C07K 16/28

(52) U.S. Cl. CPC C07K 16/2896; C07K 2317/569; C07K 2317/92

(57) ABSTRACT

As described below, the present disclosure features polypeptides capable of binding a cluster of differentiation 5 (CD5) antigen and polynucleotides encoding said CD5-binding polypeptides, compositions comprising the same, and methods for use thereof. The disclosure also features lipid nanoparticles comprising the CD5-binding polypeptides and methods for use thereof for delivery of a polynucleotide (e.g., a polynucleotide encoding a chimeric antigen receptor) to a T cell in vivo.

### CROSS REFERENCE TO RELATED APPLICATIONS

[0001] This application is a continuation under 35 U.S.C. § 111 (a) of PCT International Patent Application No. PCT/US2024/042423, filed Aug. 15, 2024, designating the United States and published in English, which claims priority to U.S. Provisional Application No. 63/520,065, filed Aug. 16, 2023, and U.S. Provisional Application No. 63/592,339, filed Oct. 23, 2023, the entire contents of each of which are hereby incorporated by reference in its entirety.

### SEQUENCE LISTING

[0002] This application contains a Sequence Listing which has been submitted electronically in XML format and is hereby incorporated by reference in its entirety. The Sequence Listing XML file, created on Aug. 14, 2024, is named 180802-055703PCT_SL.xml and is 1,228,906 bytes in size.

### BACKGROUND

[0003] Autologous and allogeneic immunotherapies are neoplasia treatment approaches in which immune cells expressing chimeric antigen receptors are administered to a subject. To generate an immune cell that expresses a chimeric antigen receptor (CAR), an immune cell of a subject (autologous) or from a donor separate from the subject receiving treatment (allogeneic) is genetically modified to express the chimeric antigen receptor. The cells may be genetically modified within the subject or modified in vitro and subsequently administered to the subject. The resulting cell expresses the chimeric antigen receptor on its cell surface (e.g., CAR-T cell) and the chimeric antigen receptor binds to an antigen expressed by a pathogenic cell in the subject, such as a neoplastic cell. This interaction with the antigen activates the CAR-T cell, which then kills the neoplastic cell. There are various challenges to be overcome when administering an autologous or allogeneic immunotherapy to a subject. For example, autologous cell therapies traditionally have disadvantages associated with having to usually obtain the starting material from the patient to be treated, including long manufacturing times and the requirement that the patient cells are suitable despite previous therapies or disease state. Further, for allogeneic cell therapy, graft-versus-host disease (GVHD) and host rejection of CAR-T cells provide additional challenges. Thus, there is a significant need for improved methods and compositions for use in autologous and allogeneic immunotherapies.

### SUMMARY

[0004] As described below, the present disclosure features polypeptides capable of binding a cluster of differentiation 5 (CD5) antigen and polynucleotides encoding said CD5-binding polypeptides, compositions comprising the same, and methods for use thereof. The disclosure also features lipid nanoparticles comprising the CD5-binding polypeptides and methods for use thereof for delivery of a polynucleotide (e.g., a polynucleotide encoding a chimeric antigen receptor) to a T cell in vivo.

[0005] In one aspect, the disclosure provides a VHH antibody or an antigen binding fragment thereof that specifically binds to a cluster of differentiation 5 (CD5) polypeptide. The VHH antibody contains three Complementarity Determining Regions (CDRs): CDR1, CDR2 and CDR3, that are structurally positioned between four camelid VHH framework (FR) regions (FR1-FR4) as follows: FR1-CDR1-FR2-CDR2-FR3-CDR3-FR4, where: a) CDR1 is selected from one or more of: NYAAG (SEQ ID NO: 478), SYTMG (SEQ ID NO: 479), TYTMG (SEQ ID NO: 480), SYAMG (SEQ ID NO: 481), TYNMG (SEQ ID NO: 482), AYAMG (SEQ ID NO: 483), SSGMG (SEQ ID NO: 484), VDATT (SEQ ID NO: 485), INVIG (SEQ ID NO: 505), SSFMS (SEQ ID NO: 506), TNVMG (SEQ ID NO: 507), TNNMG (SEQ ID NO: 508), TNNMA (SEQ ID NO: 509), RVAMN (SEQ ID NO: 510), RVGMN (SEQ ID NO: 511), FVGWG (SEQ ID NO: 512), FIGWG (SEQ ID NO: 513), MYSMS (SEQ ID NO: 514), and TYGMG (SEQ ID NO: 515); b) CDR2 is selected from one or more of RISRSGGRTDYADSVKG (SEQ ID NO: 486), AISWSAGRTYYADSMKG (SEQ ID NO: 487), VISWSGGRTYYADSVKG (SEQ ID NO: 488), AIDLYGRATRYANSVKG (SEQ ID NO: 489), AINLEGYATRYANSVKG (SEQ ID NO: 615), AIDLYGRATRYANSVRG (SEQ ID NO: 616), AINWNGDTALRWNGFATRYADSVKG (SEQ ID NO: 490), SMDWSGGSTYYGDSVKG (SEQ ID NO: 491), SIDWSGGSTYYGDSVKG (SEQ ID NO: 492), SIDWGGGSTYYGDSVKG (SEQ ID NO: 493), SIDWSGKSTYYGDSVKG (SEQ ID NO: 494), SINWSGGSAYYGDSVKG (SEQ ID NO: 495), SMDWTGGSTYYGDSVKG (SEQ ID NO: 496), IMDIGGVTEYADSVKG (SEQ ID NO: 497), LVNSGGQTHYADSVKG (SEQ ID NO: 516), TIYSDGSTYYADSVKG (SEQ ID NO: 517), TIYSDGSTYYADSMKG (SEQ ID NO: 518), LIRGGGSTHYADSVKG (SEQ ID NO: 519), LIRTGGSTHVADSMKG (SEQ ID NO: 520), TISSDGSRTNYAHSVKG (SEQ ID NO: 522), SISSDGSRTNYAHFVKG (SEQ ID NO: 523), QISTGGLTNYADSVKG (SEQ ID NO: 524), QINTGGLTDVYADSVKG (SEQ ID NO: 617), SISTGARDTAYADSVKG (SEQ ID NO: 526), SISTGARDTSYADSVKG (SEQ ID NO: 618), and VITGSGVGTQYADSVKD (SEQ ID NO: 527); and c) CDR3 is selected from one or more of: ATVWEFTDGADQYDY (SEQ ID NO: 498), DPWTSDSDYDRLTMYDY (SEQ ID NO: 499), DPWTSDSDYERLTMYDY (SEQ ID NO: 500), DTSLPLGVLTESQRLYGA (SEQ ID NO: 501), DTSLPLGVLTKSQRMYGA (SEQ ID NO: 502), DTVVSGSYYLAARAEDYEY (SEQ ID NO: 503), GTSGVAAVNLRGFFS (SEQ ID NO: 504), RGL, RYGIDNY (SEQ ID NO: 528), VTGSI (SEQ ID NO: 529), WLGSPGAMSDY (SEQ ID NO: 530), WTGSPGALSDY (SEQ ID NO: 531), PGNS (SEQ ID NO: 532), PGHP (SEQ ID NO: 533), PGHS (SEQ ID NO: 534), GDLRYGPDGYDY (SEQ ID NO: 535), and GHRPGWAVIRADAYEY (SEQ ID NO: 536).

[0006] In another aspect, the disclosure provides a chimeric antigen receptor polypeptide containing the VHH antibody of any aspect of the disclosure, or embodiments thereof, or an antigen-binding fragment thereof.

[0007] In another aspect, the disclosure provides an immunoconjugate containing the VHH antibody of any aspect of the disclosure, of embodiments thereof.

[0008] In another aspect, the disclosure provides a polynucleotide encoding the VHH antibody of any aspect of the disclosure, or embodiments thereof.

[0009] In another aspect, the disclosure provides a vector containing the polynucleotide of any aspect of the disclosure, or embodiments thereof.

[0010] In another aspect, the disclosure provides a cell expressing the VHH antibody of any aspect of the disclosure, or embodiments thereof.

[0011] In another aspect, the disclosure features a lipid nanoparticle containing the VHH antibody of any aspect of the disclosure, or embodiments thereof.

[0012] In another aspect, the disclosure features a composition containing the VHH antibody, the chimeric antigen receptor, the immunoconjugate, the polynucleotide, the vector, the cell, or the lipid nanoparticle of any aspect of the disclosure, or embodiments thereof, and a carrier or excipient.

[0013] In another aspect, the disclosure features a method for treating a neoplasia in a subject in need thereof, the method involving administering to the subject the lipid nanoparticle of any aspect of the disclosure, or embodiments thereof.

[0014] In any aspect of the disclosure, or embodiments thereof:
[0015] a) CDR1 contains the amino acid sequence NYAAG (SEQ ID NO: 478), CDR2 contains the amino acid sequence RISRSGGRTDYADSVKG (SEQ ID NO: 486), and CDR3 contains the amino acid sequence ATVWEFTDGADQYDY (SEQ ID NO: 498);
[0016] b) CDR1 contains the amino acid sequence SYTMG (SEQ ID NO: 479), CDR2 contains the amino acid sequence AISWSAGRTYYADSMKG (SEQ ID NO: 487), and CDR3 contains the amino acid sequence DPWTSDSDYDRLTMYDY (SEQ ID NO: 499);
[0017] c) CDR1 contains the amino acid sequence TYTMG (SEQ ID NO: 480), CDR2 contains the amino acid sequence AISWSAGRTYYADSMKG (SEQ ID NO: 487), and CDR3 contains the amino acid sequence DPWTSDSDYDRLTMYDY (SEQ ID NO: 499);
[0018] d) CDR1 contains the amino acid sequence SYTMG (SEQ ID NO: 479), CDR2 contains the amino acid sequence AISWSAGRTYYADSMKG (SEQ ID NO: 487), and CDR3 contains the amino acid sequence DPWTSDSDYDRLTMYDY (SEQ ID NO: 499);
[0019] e) CDR1 contains the amino acid sequence TYTMG (SEQ ID NO: 480), CDR2 contains the amino acid sequence AISWSAGRTYYADSMKG (SEQ ID NO: 487), and CDR3 contains the amino acid sequence DPWTSDSDYDRLTMYDY (SEQ ID NO: 499);
[0020] f) CDR1 contains the amino acid sequence TYTMG (SEQ ID NO: 480), CDR2 contains the amino acid sequence AISWSAGRTYYADSMKG (SEQ ID NO: 487), and CDR3 contains the amino acid sequence DPWTSDSDYDRLTMYDY (SEQ ID NO: 499);
[0021] g) CDR1 contains the amino acid sequence SYTMG (SEQ ID NO: 479), CDR2 contains the amino acid sequence AISWSAGRTYYADSMKG (SEQ ID NO: 487), and CDR3 contains the amino acid sequence DPWTSDSDYDRLTMYDY (SEQ ID NO: 499);
[0022] h) CDR1 contains the amino acid sequence TYTMG (SEQ ID NO: 480), CDR2 contains the amino acid sequence AISWSAGRTYYADSMKG (SEQ ID NO: 487), and CDR3 contains the amino acid sequence DPWTSDSDYDRLTMYDY (SEQ ID NO: 499);
[0023] i) CDR1 contains the amino acid sequence TYTMG (SEQ ID NO: 480), CDR2 contains the amino acid sequence AISWSAGRTYYADSMKG (SEQ ID NO: 487), and CDR3 contains the amino acid sequence DPWTSDSDYDRLTMYDY (SEQ ID NO: 499);
[0024] j) CDR1 contains the amino acid sequence SYAMG (SEQ ID NO: 481), CDR2 contains the amino acid sequence VISWSGGRTYYADSVKG (SEQ ID NO: 488), and CDR3 contains the amino acid sequence DPWTSDSDYERLTMYDY (SEQ ID NO: 500);
[0025] k) CDR1 contains the amino acid sequence SYAMG (SEQ ID NO: 481), CDR2 contains the amino acid sequence VISWSGGRTYYADSVKG (SEQ ID NO: 488), and CDR3 contains the amino acid sequence DPWTSDSDYERLTMYDY (SEQ ID NO: 500);
[0026] l) CDR1 contains the amino acid sequence SYAMG, CDR2 contains the amino acid sequence VISWSGGRTYYADSVKG (SEQ ID NO: 488), and CDR3 contains the amino acid sequence DPWTSDSDYERLTMYDY (SEQ ID NO: 500);
[0027] m) CDR1 contains the amino acid sequence SYAMG, CDR2 contains the amino acid sequence VISWSGGRTYYADSVKG (SEQ ID NO: 488), and CDR3 contains the amino acid sequence DPWTSDSDYERLTMYDY (SEQ ID NO: 500);
[0028] n) CDR1 contains the amino acid sequence TYNMG (SEQ ID NO: 482), CDR2 contains the amino acid sequence AIDLYGRATRYANSVKG (SEQ ID NO: 489), and CDR3 contains the amino acid sequence DTSLPLGVLTESQRLYGA (SEQ ID NO: 501);
[0029] o) CDR1 contains the amino acid sequence TYNMG (SEQ ID NO: 482), CDR2 contains the amino acid sequence AINLEGYATRYANSVKG (SEQ ID NO: 615), and CDR3 contains the amino acid sequence DTSLPLGVLTESQRLYGA (SEQ ID NO: 501);
[0030] p) CDR1 contains the amino acid sequence TYNMG (SEQ ID NO: 482), CDR2 contains the amino acid sequence AIDLYGRATRYANSVKG (SEQ ID NO: 489), and CDR3 contains the amino acid sequence DTSLPLGVLTESQRLYGA (SEQ ID NO: 501);
[0031] q) CDR1 contains the amino acid sequence TYNMG (SEQ ID NO: 482), CDR2 contains the amino acid sequence AIDLYGRATRYANSVRG (SEQ ID NO: 616), and CDR3 contains the amino acid sequence DTSLPLGVLTESQRLYGA (SEQ ID NO: 501);
[0032] r) CDR1 contains the amino acid sequence TYNMG (SEQ ID NO: 482), CDR2 contains the amino acid sequence AIDLYGRATRYANSVKG (SEQ ID NO: 489), and CDR3 contains the amino acid sequence DTSLPLGVLTESQRLYGA (SEQ ID NO: 501);
[0033] s) CDR1 contains the amino acid sequence TYNMG (SEQ ID NO: 482), CDR2 contains the amino acid sequence AIDLYGRATRYANSVKG (SEQ ID NO: 489), and CDR3 contains the amino acid sequence DTSLPLGVLTKSQRMYGA (SEQ ID NO: 502);
[0034] t) CDR1 contains the amino acid sequence AYAMG, CDR2 contains the amino acid sequence AINWNGDTALRWNGFATRYADSVKG (SEQ ID NO: 490), and CDR3 contains the amino acid sequence DTVVSGSYYLAARAEDYEY (SEQ ID NO: 503);
[0035] u) CDR1 contains the amino acid sequence AYAMG, CDR2 contains the amino acid sequence AINWNGDTALRWNGFATRYADSVKG (SEQ ID NO: 490), and CDR3 contains the amino acid sequence DTVVSGSYYLAARAEDYEY (SEQ ID NO: 503);
[0036] v) CDR1 contains the amino acid sequence AYAMG, CDR2 contains the amino acid sequence AINWNGDTALRWNGFATRYADSVKG (SEQ ID NO: 490), and CDR3 contains the amino acid sequence DTVVSGSYYLAARAEDYEY (SEQ ID NO: 503);
[0037] w) CDR1 contains the amino acid sequence AYAMG, CDR2 contains the amino acid sequence AINWNGDTALRWNGFATRYADSVKG (SEQ ID NO: 490), and CDR3 contains the amino acid sequence DTVVSGSYYLAARAEDYEY (SEQ ID NO: 503);
[0038] x) CDR1 contains the amino acid sequence SSGMG (SEQ ID NO: 484), CDR2 contains the amino acid sequence SMDWSGGSTYYGDSVKG (SEQ ID NO: 491), and CDR3 contains the amino acid sequence GTSGVAAVNLRGFFS (SEQ ID NO: 504);
[0039] y) CDR1 contains the amino acid sequence SSGMG (SEQ ID NO: 484), CDR2 contains the amino acid sequence SIDWSGGSTYYGDSVKG (SEQ ID NO: 492), and CDR3 contains the amino acid sequence GTSGVAAVNLRGFFS (SEQ ID NO: 504);
[0040] z) CDR1 contains the amino acid sequence SSGMG (SEQ ID NO: 484), CDR2 contains the amino acid sequence SMDWSGGSTYYGDSVKG (SEQ ID NO: 491), and CDR3 contains the amino acid sequence GTSGVAAVNLRGFFS (SEQ ID NO: 504);
[0041] aa) CDR1 contains the amino acid sequence SSGMG (SEQ ID NO: 484), CDR2 contains the amino acid sequence SIDWGGGSTYYGDSVKG (SEQ ID NO: 493), and CDR3 contains the amino acid sequence GTSGVAAVNLRGFFS (SEQ ID NO: 504);
[0042] ab) CDR1 contains the amino acid sequence SSGMG (SEQ ID NO: 484), CDR2 contains the amino acid sequence SIDWSGGSTYYGDSVKG (SEQ ID NO: 492), and CDR3 contains the amino acid sequence GTSGVAAVNLRGFFS (SEQ ID NO: 504);
[0043] ac) CDR1 contains the amino acid sequence SSGMG (SEQ ID NO: 484), CDR2 contains the amino acid sequence SIDWSGKSTYYGDSVKG (SEQ ID NO: 494), and CDR3 contains the amino acid sequence GTSGVAAVNLRGFFS (SEQ ID NO: 504);
[0044] ad) CDR1 contains the amino acid sequence SSGMG (SEQ ID NO: 484), CDR2 contains the amino acid sequence SINWSGGSAYYGDSVKG (SEQ ID NO: 495), and CDR3 contains the amino acid sequence GTSGVAAVNLRGFFS (SEQ ID NO: 504);
[0045] ae) CDR1 contains the amino acid sequence SSGMG (SEQ ID NO: 484), CDR2 contains the amino acid sequence SMDWSGGSTYYGDSVKG (SEQ ID NO: 491), and CDR3 contains the amino acid sequence GTSGVAAVNLRGFFS (SEQ ID NO: 504);
[0046] af) CDR1 contains the amino acid sequence SSGMG (SEQ ID NO: 484), CDR2 contains the amino acid sequence SMDWTGGSTYYGDSVKG (SEQ ID NO: 496), and CDR3 contains the amino acid sequence GTSGVAAVNLRGFFS (SEQ ID NO: 504);
[0047] ag) CDR1 contains the amino acid sequence VDATT (SEQ ID NO: 485), CDR2 contains the amino acid sequence IMDIGGVTEYADSVKG (SEQ ID NO): 497), and CDR3 contains the amino acid sequence RGL;
[0048] ah) CDR1 contains the amino acid sequence INVIG (SEQ ID NO: 505), CDR2 contains the amino acid sequence LVNSGGQTHYADSVKG (SEQ ID NO: 516), and CDR3 contains the amino acid sequence RYGIDNY (SEQ ID NO: 528);
[0049] ai) CDR1 contains the amino acid sequence SSFMS (SEQ ID NO: 506), CDR2 contains the amino acid sequence TIYSDGSTYYADSVKG (SEQ ID NO: 517), and CDR3 contains the amino acid sequence VTGSI (SEQ ID NO: 529);
[0050] aj) CDR1 contains the amino acid sequence SSFMS (SEQ ID NO: 506), CDR2 contains the amino acid sequence TIYSDGSTYYADSMKG (SEQ ID NO: 518), and CDR3 contains the amino acid sequence VTGSI (SEQ ID NO: 529);
[0051] ak) CDR1 contains the amino acid sequence TNVMG (SEQ ID NO: 507), CDR2 contains the amino acid sequence LIRGGGSTHYADSVKG (SEQ ID NO: 519), and CDR3 contains the amino acid sequence WLGSPGAMSDY (SEQ ID NO: 530);
[0052] al) CDR1 contains the amino acid sequence TNNMG (SEQ ID NO: 508), CDR2 contains the amino acid sequence LIRTGGSTHVADSMKG (SEQ ID NO: 520), and CDR3 contains the amino acid sequence WTGSPGALSDY (SEQ ID NO: 531);
[0053] am) CDR1 contains the amino acid sequence TNNMA (SEQ ID NO: 509), CDR2 contains the amino acid sequence LIRTGGSTHVADSMKG (SEQ ID NO: 520), and CDR3 contains the amino acid sequence WTGSPGALSDY (SEQ ID NO: 531);
[0054] an) CDR1 contains the amino acid sequence RVAMN (SEQ ID NO: 510), CDR2 contains the amino acid sequence TISSDGSRTNYAHSVKG (SEQ ID NO: 522), and CDR3 contains the amino acid sequence PGNS (SEQ ID NO: 532);
[0055] ao) CDR1 contains the amino acid sequence RVGMN (SEQ ID NO: 511), CDR2 contains the amino acid sequence SISSDGSRTNYAHFVKG (SEQ ID NO: 523), and CDR3 contains the amino acid sequence PGNS (SEQ ID NO: 532);
[0056] ap) CDR1 contains the amino acid sequence FVGWG (SEQ ID NO: 512), CDR2 contains the amino acid sequence QISTGGLTNYADSVKG (SEQ ID NO: 524), and CDR3 contains the amino acid sequence PGHP (SEQ ID NO: 533);
[0057] aq) CDR1 contains the amino acid sequence FIGWG (SEQ ID NO: 513), CDR2 contains the amino acid sequence QINTGGLTDYADSVKG (SEQ ID NO: 525), and CDR3 contains the amino acid sequence PGHS (SEQ ID NO: 534);
[0058] ar) CDR1 contains the amino acid sequence MYSMS (SEQ ID NO: 514), CDR2 contains the amino acid sequence SISTGARDTAYADSVKG (SEQ ID NO: 526), and CDR3 contains the amino acid sequence GDLRYGPDGYDY (SEQ ID NO: 535);
[0059] as) CDR1 contains the amino acid sequence MYSMS (SEQ ID NO: 514), CDR2 contains the amino acid sequence SISTGARDTAYADSVKG (SEQ ID NO: 526), and CDR3 contains the amino acid sequence GDLRYGPDGYDY (SEQ ID NO: 535);
[0060] at) CDR1 contains the amino acid sequence MYSMS (SEQ ID NO: 514), CDR2 contains the amino acid sequence SISTGARDTSYADSVKG (SEQ ID NO: 618), and CDR3 contains the amino acid sequence GDLRYGPDGYDY (SEQ ID NO: 535); or
[0061] au) CDR1 contains the amino acid sequence TYGMG (SEQ ID NO: 515), CDR2 contains the amino acid sequence VITGSGVGTQYADSVKD (SEQ ID NO: 527), and CDR3 contains the amino acid sequence GHRPGWAVIRADAYEY (SEQ ID NO: 536).

[0062] In any aspect of the disclosure, or embodiments thereof:
[0063] a) FR1 contains the following amino acid sequence: X₁X₂QLX₃ESGGX₄VQX₅GX₆SX₇RLX₈CX₉X₁₀SGX₁₁X₁₂X₁₃X₁₄ (SEQ ID NO: 604), where X₁ is E or Q; X₂ is L or V; X₃ is V or Q; X₄ is L or S; X₅ is P or A; X₆ is A, E, or G; X₇ is L, R, or V; X₈ is A or S; X₉ is A or V; X₁₀ is A, T, or V; X₁₁ is A, D, F, G, I, P, R, or S; X₁₂ is A, D, I, N, P, S, T, or V; X₁₃ is A, F, null, S, or V; and X₁₄ is I, L, null, or S;
[0064] b) FR2 contains the amino acid sequence: WX₁₅RX₁₆APGX₁₇X₁₈X₁₉X₂₀X₂₁VX₂₂ (SEQ ID NO: 605), where X₁₅ is F, V, or Y; X₁₆ is H or Q; X₁₇ is E or K; X₁₈ A, D, E, G, R, or Q; X₁₉ is L or R; X₂₀ is D or E; X₂₁ is F, L, V, or W; and X₂₂ is A or S;
[0065] c) FR3 contains the amino acid sequence: RFX₂₃X₂₄SRX₂₅X₂₆X₂₇X₂₈X₂₉X₃₀X₃₁X₃₂LX₃₃MX₃₄X₃₅LX₃₆X₃₇EDTAX₃₈YYCX₃₉X₄₀ (SEQ ID NO: 606), where X₂₃ is A, I, or T; X₂₄ is I or V; X₂₅ is D, E, or V; X₂₆ is H, I, or N; X₂₇ is A or T; X₂₈ is D or K; X₂₉ is K, M, N, R, S, or T; X₃₀ is A, M, or T; X₃₁ is A, L, or V; X₃₂ is F, H, N, or Y; X₃₃ is H or Q; X₃₄ is N or S; X₃₅ is G, N, S, or T; X₃₆ is K or R; X₃₇ is A, F, L, P, or V; X₃₈ is V or E; X₃₉ is A, H, N, or V; and X₄₀ is A, E, F, G, I, N, R, T, or V; and/or
[0066] d) FR4 contains the amino acid sequence: X₄₀GX₄₁GTX₄₂VX₄₃VX₄₄S (SEQ ID NO: 607), where X₄₀ is R or W; X₄₁ is Q, E, or P; X₄₂ is L or Q; X₄₃ is S or T; and X₄₄ is S or V.

[0067] In any aspect of the disclosure, or embodiments thereof:
[0068] a) FR1 contains an amino acid sequence selected from one or more of:

```
(SEQ ID NO: 537)
QVQLVESGGGLVQPGGSLRLSCAASGRTF,
  (SEQ ID NO: 538)
EVQLVESGGGLVQAGGSLRLSCAASGRTFG,
  (SEQ ID NO: 543)
QVQLQESGGGLVQAGGSLRLSCAASGRTFG,
  (SEQ ID NO: 619)
QVQLVESGGGLVQAGGSLRLSCAASGRTFG,
  (SEQ ID NO: 544)
EVQLVESGGGLVQAGGSLRLSCAASGGTVS,
(SEQ ID NO: 545)
EVQLVESGGGLVQAGGSRRLSCAASGGTVS,
  (SEQ ID NO: 546)
QVQLVESGGGLVQAGGSLRLSCAASGGTVS,
(SEQ ID NO: 548)
EVQLVESGGGLVQAGASLRLSCAASGRT,
  (SEQ ID NO: 549)
QVQLQESGGGLVQAGASLRLSCAASGRA,
(SEQ ID NO: 550)
QVQLQESGGGLVQAGASLRLSCAASGRT,
(SEQ ID NO: 551)
QVQLVESGGGLVQAGASLRLSCAASGRT,
(SEQ ID NO: 554)
QVQLQESGGGSVQAGGSLRLSCAASGRAFS,
(SEQ ID NO: 559)
EVQLVESGGGLVQAGGSLRLSCAASGPAFS,
(SEQ ID NO: 560)
QVQLQESGGGLVQAGGSLRLSCAASGPAFS,
(SEQ ID NO: 561)
QVQLVESGGGLVQAGGSLRLACAASGAAFS,
(SEQ ID NO: 562)
QVQLVESGGGLVQAGGSLRLSCAASGPAFS,
(SEQ ID NO: 569)
QLQLVESGGGLVQPGGSLRLSCAASGSDFL,
(SEQ ID NO: 573)
QVQLQESGGGLVQAGGSLRLSCATSGITSS,
(SEQ ID NO: 577)
EVQLVESGGGLVQPGGSLRLSCAASGFPFS,
(SEQ ID NO: 578)
QVQLVESGGGLVQPGGSLRLSCAASGENFS,
(SEQ ID NO: 584)
QVQLVESGGGLVQPGGSVRLSCATSGSIFS,
(SEQ ID NO: 587)
EVQLVESGGGLVQPGGSLRLSCAASGSVVS,
(SEQ ID NO: 588)
QVQLVESGGGLVQPGGSLRLSCAASGSDAS,
(SEQ ID NO: 590)
QLQLVESGGGLVQPGESLRLSCAASGFSFS,
(SEQ ID NO: 594)
QLQLVESGGGLVQPGESLRLSCVVSGDIFS,
(SEQ ID NO: 597)
QVQLVESGGGLVQPGESLRLSCVVSGDIFS,
(SEQ ID NO: 599)
QVQLVESGGGLVQPGGSLRLSCAASGFTFS,
and
(SEQ ID NO: 602)
QVQLVESGGGLVQPGGSLRLSCVASGGTFS;
```

[0069] b) FR2 contains an amino acid sequence selected from one or more of:

```
(SEQ ID NO: 539)
WFRQAPGKEREFVA,
  (SEQ ID NO: 620)
WFRQAPGKGREFVA,
  (SEQ ID NO: 621)
WFRQAPGREREFVA,
  (SEQ ID NO: 552)
WFRHAPGKDREFVA,
(SEQ ID NO: 553)
WFRHAPGEDREFVA,
(SEQ ID NO: 563)
WFRQAPGKARDFVA,
  (SEQ ID NO: 567)
WFRQAPGKAREFVA,
  (SEQ ID NO: 570)
WFRQAPGNQREFVA,
  (SEQ ID NO: 574)
WYRQAPGKQRELVA,
  (SEQ ID NO: 579)
WVRQAPGKGLEWVS,
  (SEQ ID NO: 580)
WVRQAPGKEVEWVS,
  (SEQ ID NO: 585)
WYRQAPGKEREFVA,
  (SEQ ID NO: 591)
WYRQAPGKERELVA,
  (SEQ ID NO: 595)
WYRQAPGKQREVVA,
and
  (SEQ ID NO: 600)
WVRQAPGKRLEWVS;
```

[0070] c) FR3 contains an amino acid sequence selected from one or more of:

(SEQ ID NO: 540)
RFTISRDNAKSTVYLQMNSLRPEDTAVYYCAE,
(SEQ ID NO: 541)
RFTISRDNAKNTVYLQMNSLKPEDTAVYYCAA,
(SEQ ID NO: 547)
RFTISRDNAKNTVNLQMNSLKPEDTAVYYCAA,
(SEQ ID NO: 555)
RFIISRVNAKNTVNLQMNSLKPEDTAVYYCAA,
(SEQ ID NO: 556)
RFTISRVIAKNTVNLQMNSLKPEDTAVYYCAA,
(SEQ ID NO: 558)
RFTISRVNAKNTVNLQMNSLKPEDTAVYYCAA,
(SEQ ID NO: 564)
RFTVSRDNAKNTVHLQMNSLRPEDTAVYYCAR,
(SEQ ID NO: 565)
RFTVSRDNAKNAVHLQMNSLRPEDTAVYYCAR,
(SEQ ID NO: 568)
RFTVSRDNAKMTVHLQMNSLRPEDTAVYYCAR,
(SEQ ID NO: 571)
RFTISRDHTKNTVYLQMNSLKVEDTAVYYCNT,
(SEQ ID NO: 575)
RFTISRDNAKNTVFLQMNSLKPEDTAEYYCHG,
(SEQ ID NO: 581)
RFTISRDNAKKTAYLQMNSLKAEDTAVYYCAT,
(SEQ ID NO: 582)
RFTISRDNAKNTVYLQMSNLKAEDTAVYYCAT,
(SEQ ID NO: 586)
RFIISRENAKTTVYLQMNGLKPEDTAVYYCVI,
(SEQ ID NO: 589)
RFTISRENAKNTVYLQMNSLKPEDTAVYYCVI,
(SEQ ID NO: 592)
RFTISRENAKNMVYLQMNSLKLEDTAVYYCNV,
(SEQ ID NO: 593)
RFTISRDNVKNMVYLQMNSLKLEDTAVYYCNV,
(SEQ ID NO: 596)
RFAISRDNAKRTVYLQMNSLKFEDTAVYYCNV,
(SEQ ID NO: 598)
RFTISRDNAKRTVYLQMNSLKFEDTAVYYCNF,
(SEQ ID NO: 601)
RFTISRDNADNTLYLHMNNLKPEDTAVYYCAN,
and
(SEQ ID NO: 603)
RFTISRENAKNTVYLQMNTLKLEDTAVYYCVS;

and/or
[0071] d) FR4 contains an amino acid sequence selected from one or more of: WGQGTQVTVSS (SEQ ID NO: 542), WGQGTQVSVSS (SEQ ID NO: 557), WGPGTQVTVSS (SEQ ID NO: 566), WGQGTLVTVSS (SEQ ID NO: 572), WGEGTQVTVSS (SEQ ID NO: 576), RGQGTQVTVSS (SEQ ID NO: 583), and RGQGTQVTVVS (SEQ ID NO: 622).

[0072] In any aspect of the disclosure, or embodiments thereof:
[0073] a) FR1 contains the amino acid sequence QVQLVESGGGLVQPGGSLRLSCAASGRTFI (SEQ ID NO: 537), FR2 contains the amino acid sequence WFRQAPGKEREFVA (SEQ ID NO: 539), FR3 contains the amino acid sequence RFTISRDNAKSTVYLQMNSLRPEDTAVYYCAE (SEQ ID NO: 540), and FR4 contains the amino acid sequence WGQGTQVTVSS (SEQ ID NO: 542);
[0074] b) FR1 contains the amino acid sequence EVOLVESGGGLVQAGGSLRLSCAASGRTFG (SEQ ID NO: 538), FR2 contains the amino acid sequence WFRQAPGKEREFVA (SEQ ID NO: 539), FR3 contains the amino acid sequence RFTISRDNAKNTVYLQMNSLKPEDTAVYYCAA (SEQ ID NO: 541), and FR4 contains the amino acid sequence WGQGTQVTVSS (SEQ ID NO: 542);
[0075] c) FR1 contains the amino acid sequence EVOLVESGGGLVQAGGSLRLSCAASGRTFG (SEQ ID NO: 538), FR2 contains the amino acid sequence WFRQAPGKEREFVA (SEQ ID NO: 539), FR3 contains the amino acid sequence RFTISRDNAKNTVYLQMNSLKPEDTAVYYCAA (SEQ ID NO: 541), and FR4 contains the amino acid sequence WGQGTQVTVSS (SEQ ID NO: 542);
[0076] d) FR1 contains the amino acid sequence QVQLQESGGGLVQAGGSLRLSCAASGRTFG (SEQ ID NO: 543), FR2 contains the amino acid sequence WFRQAPGKEREFVA (SEQ ID NO: 539), FR3 contains the amino acid sequence RFTISRDNAKNTVYLQMNSLKPEDTAVYYCAA (SEQ ID NO: 541), and FR4 contains the amino acid sequence WGQGTQVTVSS (SEQ ID NO: 542);
[0077] e) FR1 contains the amino acid sequence QVQLQESGGGLVQAGGSLRLSCAASGRTFG (SEQ ID NO: 543), FR2 contains the amino acid sequence WFRQAPGKEREFVA (SEQ ID NO: 539), FR3 contains the amino acid sequence RFTISRDNAKNTVYLQMNSLKPEDTAVYYCAA (SEQ ID NO: 541), and FR4 contains the amino acid sequence WGQGTQVTVSS (SEQ ID NO: 542);
[0078] f) FR1 contains the amino acid sequence QVQLQESGGGLVQAGGSLRLSCAASGRTFG (SEQ ID NO: 543), FR2 contains the amino acid sequence WFRQAPGKGREFVA (SEQ ID NO: 620), FR3 contains the amino acid sequence RFTISRDNAKNTVYLQMNSLKPEDTAVYYCAA (SEQ ID NO: 541), and FR4 contains the amino acid sequence WGQGTQVTVSS (SEQ ID NO: 542);
[0079] g) FR1 contains the amino acid sequence QVQLVESGGGLVQAGGSLRLSCAASGRTFG (SEQ ID NO: 619), FR2 contains the amino acid sequence WFRQAPGKEREFVA (SEQ ID NO: 539), FR3 contains the amino acid sequence RFTISRDNAKNTVYLQMNSLKPEDTAVYYCAA (SEQ ID NO: 541), and FR4 contains the amino acid sequence WGQGTQVTVSS (SEQ ID NO: 542);
[0080] h) FR1 contains the amino acid sequence QVQLVESGGGLVQAGGSLRLSCAASGRTFG (SEQ ID NO: 619), FR2 contains the amino acid sequence WFRQAPGKEREFVA (SEQ ID NO: 539), FR3 contains the amino acid sequence RFTISRDNAKNTVYLQMNSLKPEDTAVYYCAA (SEQ ID NO: 541), and FR4 contains the amino acid sequence WGQGTQVTVSS (SEQ ID NO: 542);
[0081] i) FR1 contains the amino acid sequence QVQLVESGGGLVQAGGSLRLSCAASGRTFG (SEQ ID NO: 619), FR2 contains the amino acid sequence WFRQAPGREREFVA (SEQ ID NO: 621), FR3 contains the amino acid sequence RFTISRDNAKNTVYLQMNSLKPEDTAVYYCAA (SEQ ID NO: 541), and FR4 contains the amino acid sequence WGQGTQVTVSS (SEQ ID NO: 542);
[0082] j) FR1 contains the amino acid sequence EVOLVESGGGLVQAGGSLRLSCAASGGTVS (SEQ ID NO: 544), FR2 contains the amino acid sequence WFRQAPGKEREFVA (SEQ ID NO: 539), FR3 contains the amino acid sequence RFTISRDNAKNTVNLQMNSLKPEDTAVYYCAA (SEQ ID NO: 547), and FR4 contains the amino acid sequence WGQGTQVTVSS (SEQ ID NO: 542);
[0083] k) FR1 contains the amino acid sequence EVOLVESGGGLVQAGGSRRLSCAASGGTVS (SEQ ID NO: 545), FR2 contains the amino acid sequence WFRQAPGKEREFVA (SEQ ID NO: 539), FR3 contains the amino acid sequence RFTISRDNAKNTVYLQMNSLKPEDTAVYYCAA (SEQ ID NO: 541), and FR4 contains the amino acid sequence WGQGTQVTVSS (SEQ ID NO: 542);
[0084] l) FR1 contains the amino acid sequence QVQLVESGGGLVQAGGSLRLSCAASGGTVS (SEQ ID NO: 546), FR2 contains the amino acid sequence WFRQAPGKEREFVA (SEQ ID NO: 539), FR3 contains the amino acid sequence RFTISRDNAKNTVNLQMNSLKPEDTAVYYCAA (SEQ ID NO: 547), and FR4 contains the amino acid sequence WGQGTQVTVSS (SEQ ID NO: 542);
[0085] m) FR1 contains the amino acid sequence QVQLVESGGGLVQAGGSLRLSCAASGGTVS (SEQ ID NO: 546), FR2 contains the amino acid sequence WFRQAPGKEREFVA (SEQ ID NO: 539), FR3 contains the amino acid sequence RFTISRDNAKNTVYLQMNSLKPEDTAVYYCAA (SEQ ID NO: 541), and FR4 contains the amino acid sequence WGQGTQVTVSS (SEQ ID NO: 542);
[0086] n) FR1 contains the amino acid sequence EVOLVESGGGLVQAGASLRLSCAASGRT (SEQ ID NO: 548), FR2 contains the amino acid sequence WFRHAPGKDREFVA (SEQ ID NO: 552), FR3 contains the amino acid sequence RFTISRDNAKNTVYLQMNSLKPEDTAVYYCAA (SEQ ID NO: 541), and FR4 contains the amino acid sequence WGQGTQVTVSS (SEQ ID NO: 542);
[0087] o) FR1 contains the amino acid sequence QVQLQESGGGLVQAGASLRLSCAASGRA (SEQ ID NO: 549), FR2 contains the amino acid sequence WFRHAPGEDREFVA (SEQ ID NO: 553), FR3 contains the amino acid sequence RFTISRDNAKNTVYLQMNSLKPEDTAVYYCAA (SEQ ID NO: 541), and FR4 contains the amino acid sequence WGQGTQVTVSS (SEQ ID NO: 542);
[0088] p) FR1 contains the amino acid sequence QVQLQESGGGLVQAGASLRLSCAASGRT (SEQ ID NO: 550), FR2 contains the amino acid sequence WFRHAPGKDREFVA (SEQ ID NO: 552), FR3 contains the amino acid sequence RFTISRDNAKNTVYLQMNSLKPEDTAVYYCAA (SEQ ID NO: 541), and FR4 contains the amino acid sequence WGQGTQVTVSS (SEQ ID NO: 542);
[0089] q) FR1 contains the amino acid sequence QVQLQESGGGLVQAGASLRLSCAASGRT (SEQ ID NO: 550), FR2 contains the amino acid sequence WFRHAPGKDREFVA (SEQ ID NO: 552), FR3 contains the amino acid sequence RFTISRDNAKNTVYLQMNSLKPEDTAVYYCAA (SEQ ID NO: 541), and FR4 contains the amino acid sequence WGQGTQVTVSS (SEQ ID NO: 542);
[0090] r) FR1 contains the amino acid sequence QVQLVESGGGLVQAGASLRLSCAASGRT (SEQ ID NO: 551), FR2 contains the amino acid sequence WFRHAPGKDREFVA (SEQ ID NO: 552), FR3 contains the amino acid sequence RFTISRDNAKNTVYLQMNSLKPEDTAVYYCAA (SEQ ID NO: 541), and FR4 contains the amino acid sequence WGQGTQVTVSS (SEQ ID NO: 542);
[0091] s) FR1 contains the amino acid sequence QVQLVESGGGLVQAGASLRLSCAASGRT (SEQ ID NO: 551), FR2 contains the amino acid sequence WFRHAPGKDREFVA (SEQ ID NO: 552), FR3 contains the amino acid sequence RFTISRDNAKNTVYLQMNSLKPEDTAVYYCAA (SEQ ID NO: 541), and FR4 contains the amino acid sequence WGQGTQVTVSS (SEQ ID NO: 542);
[0092] t) FR1 contains the amino acid sequence QVQLQESGGGSVQAGGSLRLSCAASGRAFS (SEQ ID NO: 554), FR2 contains the amino acid sequence WFRQAPGKEREFVA (SEQ ID NO: 539), FR3 contains the amino acid sequence RFIISRVNAKNTVNLQMNSLKPEDTAVYYCAA (SEQ ID NO: 555), and FR4 contains the amino acid sequence WGQGTQVSVSS (SEQ ID NO: 557);
[0093] u) FR1 contains the amino acid sequence QVQLQESGGGSVQAGGSLRLSCAASGRAFS (SEQ ID NO: 554), FR2 contains the amino acid sequence WFRQAPGKEREFVA (SEQ ID NO: 539), FR3 contains the amino acid sequence RFTISRVIAKNTVNLQMNSLKPEDTAVYYCAA (SEQ ID NO: 556), and FR4 contains the amino acid sequence WGQGTQVTVSS (SEQ ID NO: 542);
[0094] v) FR1 contains the amino acid sequence QVQLQESGGGSVQAGGSLRLSCAASGRAFS (SEQ ID NO: 554), FR2 contains the amino acid sequence WFRQAPGKEREFVA (SEQ ID NO: 539), FR3 contains the amino acid sequence RFTISRVNAKNTVNLQMNSLKPEDTAVYYCAA (SEQ ID NO: 558), and FR4 contains the amino acid sequence WGQGTQVSVSS (SEQ ID NO: 557);
[0095] w) FR1 contains the amino acid sequence QVQLQESGGGSVQAGGSLRLSCAASGRAFS (SEQ ID NO: 554), FR2 contains the amino acid sequence WFRQAPGKEREFVA (SEQ ID NO: 539), FR3 contains the amino acid sequence RFTISRVNAKNTVNLQMNSLKPEDTAVYYCAA (SEQ ID NO: 558), and FR4 contains the amino acid sequence WGQGTQVTVSS (SEQ ID NO: 542);
[0096] x) FR1 contains the amino acid sequence EVOLVESGGGLVQAGGSLRLSCAASGPAFS (SEQ ID NO: 559), FR2 contains the amino acid sequence WFRQAPGKARDFVA (SEQ ID NO: 563), FR3 contains the amino acid sequence RFTVSRDNAKNTVHLQMNSLRPEDTAVYYCAR (SEQ ID NO: 564), and FR4 contains the amino acid sequence WGPGTQVTVSS (SEQ ID NO: 566);
[0097] y) FR1 contains the amino acid sequence QVQLQESGGGLVQAGGSLRLSCAASGPAFS (SEQ ID NO: 560), FR2 contains the amino acid sequence WFRQAPGKARDFVA (SEQ ID NO: 563), FR3 contains the amino acid sequence RFTVSRDNAKNTVHLQMNSLRPEDTAVYYCAR (SEQ ID NO: 564), and FR4 contains the amino acid sequence WGPGTQVTVSS (SEQ ID NO: 566);
[0098] z) FR1 contains the amino acid sequence QVQLVESGGGLVQAGGSLRLACAASGAAFS (SEQ ID NO: 561), FR2 contains the amino acid sequence WFRQAPGKARDFVA (SEQ ID NO: 563), FR3 contains the amino acid sequence RFTVSRDNAKNTVHLQMNSLRPEDTAVYYCAR (SEQ ID NO: 564), and FR4 contains the amino acid sequence WGPGTQVTVSS (SEQ ID NO: 566);
[0099] aa) FR1 contains the amino acid sequence QVQLVESGGGLVQAGGSLRLSCAASGPAFS (SEQ ID NO: 562), FR2 contains the amino acid sequence WFRQAPGKARDFVA (SEQ ID NO: 563), FR3 contains the amino acid sequence RFTVSRDNAKNAVHLQMNSLRPEDTAVYYCAR (SEQ ID NO: 565), and FR4 contains the amino acid sequence WGPGTQVTVSS (SEQ ID NO: 566);
[0100] ab) FR1 contains the amino acid sequence QVQLVESGGGLVQAGGSLRLSCAASGPAFS (SEQ ID NO: 562), FR2 contains the amino acid sequence WFRQAPGKARDFVA (SEQ ID NO: 563), FR3 contains the amino acid sequence RFTVSRDNAKNTVHLQMNSLRPEDTAVYYCAR (SEQ ID NO: 564), and FR4 contains the amino acid sequence WGPGTQVTVSS (SEQ ID NO: 566);
[0101] ac) FR1 contains the amino acid sequence QVQLVESGGGLVQAGGSLRLSCAASGPAFS (SEQ ID NO: 562), FR2 contains the amino acid sequence WFRQAPGKARDFVA (SEQ ID NO: 563), FR3 contains the amino acid sequence RFTVSRDNAKNTVHLQMNSLRPEDTAVYYCAR (SEQ ID NO: 564), and FR4 contains the amino acid sequence WGPGTQVTVSS (SEQ ID NO: 566);
[0102] ad) FR1 contains the amino acid sequence QVQLVESGGGLVQAGGSLRLSCAASGPAFS (SEQ ID NO: 562), FR2 contains the amino acid sequence WFRQAPGKARDFVA (SEQ ID NO: 563), FR3 contains the amino acid sequence RFTVSRDNAKNTVHLQMNSLRPEDTAVYYCAR (SEQ ID NO: 564), and FR4 contains the amino acid sequence WGPGTQVTVSS (SEQ ID NO: 566);
[0103] ae) FR1 contains the amino acid sequence QVQLVESGGGLVQAGGSLRLSCAASGPAFS (SEQ ID NO: 562), FR2 contains the amino acid sequence WFRQAPGKARDFVA (SEQ ID NO: 563), FR3 contains the amino acid sequence RFTVSRDNAKNTVHLQMNSLRPEDTAVYYCAR (SEQ ID NO: 564), and FR4 contains the amino acid sequence WGPGTQVTVSS (SEQ ID NO: 566);
[0104] af) FR1 contains the amino acid sequence QVQLVESGGGLVQAGGSLRLSCAASGPAFS (SEQ ID NO: 562), FR2 contains the amino acid sequence WFRQAPGKAREFVA (SEQ ID NO: 567), FR3 contains the amino acid sequence RFTVSRDNAKMTVHLQMNSLRPEDTAVYYCAR (SEQ ID NO: 568), and FR4 contains the amino acid sequence WGPGTQVTVSS (SEQ ID NO: 566);
[0105] ag) FR1 contains the amino acid sequence QLQLVESGGGLVQPGGSLRLSCAASGSDFL (SEQ ID NO: 569), FR2 contains the amino acid sequence WFRQAPGNQREFVA (SEQ ID NO: 570), FR3 contains the amino acid sequence RFTISRDHTKNTVYLQMNSLKVEDTAVYYCNT (SEQ ID NO: 571), and FR4 contains the amino acid sequence WGQGTLVTVSS (SEQ ID NO: 572);
[0106] ah) FR1 contains the amino acid sequence QVQLQESGGGLVQAGGSLRLSCATSGITSS (SEQ ID NO: 573), FR2 contains the amino acid sequence WYRQAPGKQRELVA (SEQ ID NO: 574), FR3 contains the amino acid sequence RFTISRDNAKNTVFLQMNSLKPEDTAEYYCHG (SEQ ID NO: 575), and FR4 contains the amino acid sequence WGEGTQVTVSS (SEQ ID NO: 576);
[0107] ai) FR1 contains the amino acid sequence EVOLVESGGGLVQPGGSLRLSCAASGFPFS (SEQ ID NO: 577), FR2 contains the amino acid sequence WVRQAPGKGLEWVS (SEQ ID NO: 579), FR3 contains the amino acid sequence RFTISRDNAKKTAYLQMNSLKAEDTAVYYCAT (SEQ ID NO: 581), and FR4 contains the amino acid sequence RGQGTQVTVSS (SEQ ID NO: 583);
[0108] aj) FR1 contains the amino acid sequence QVQLVESGGGLVQPGGSLRLSCAASGFNFS (SEQ ID NO: 578), FR2 contains the amino acid sequence WVRQAPGKEVEWVS (SEQ ID NO: 580), FR3 contains the amino acid sequence RFTISRDNAKNTVYLQMSNLKAEDTAVYYCAT (SEQ ID NO: 582), and FR4 contains the amino acid sequence RGQGTQVTVSS (SEQ ID NO: 583);
[0109] ak) FR1 contains the amino acid sequence QVQLVESGGGLVQPGGSVRLSCATSGSIFS (SEQ ID NO: 584), FR2 contains the amino acid sequence WYRQAPGKEREFVA (SEQ ID NO: 585), FR3 contains the amino acid sequence RFIISRENAKTTVYLQMNGLKPEDTAVYYCVI (SEQ ID NO: 586), and FR4 contains the amino acid sequence WGQGTQVTVSS (SEQ ID NO: 542);
[0110] al) FR1 contains the amino acid sequence EVOLVESGGGLVQPGGSLRLSCAASGSVVS (SEQ ID NO: 587), FR2 contains the amino acid sequence WYRQAPGKEREFVA (SEQ ID NO: 585), FR3 contains the amino acid sequence RFTISRENAKNTVYLQMNSLKPEDTAVYYCVI (SEQ ID NO: 589), and FR4 contains the amino acid sequence WGQGTQVTVSS (SEQ ID NO: 542);
[0111] am) FR1 contains the amino acid sequence QVQLVESGGGLVQPGGSLRLSCAASGSDAS (SEQ ID NO: 588), FR2 contains the amino acid sequence WYRQAPGKEREFVA (SEQ ID NO: 585), FR3 contains the amino acid sequence RFTISRENAKNTVYLQMNSLKPEDTAVYYCVI (SEQ ID NO: 589), and FR4 contains the amino acid sequence WGQGTQVTVSS (SEQ ID NO: 542);
[0112] an) FR1 contains the amino acid sequence QLQLVESGGGLVQPGESLRLSCAASGFSFS (SEQ ID NO: 590), FR2 contains the amino acid sequence WYRQAPGKERELVA (SEQ ID NO: 591), FR3 contains the amino acid sequence RFTISRENAKNMVYLQMNSLKLEDTAVYYCNV (SEQ ID NO: 592), and FR4 contains the amino acid sequence WGQGTQVTVSS (SEQ ID NO: 542);
[0113] ao) FR1 contains the amino acid sequence QLQLVESGGGLVQPGESLRLSCAASGFSFS (SEQ ID NO: 590), FR2 contains the amino acid sequence WYRQAPGKERELVA (SEQ ID NO: 591), FR3 contains the amino acid sequence RFTISRDNVKNMVYLQMNSLKLEDTAVYYCNV (SEQ ID NO: 593), and FR4 contains the amino acid sequence WGQGTQVTVSS (SEQ ID NO: 542);
[0114] ap) FR1 contains the amino acid sequence QLQLVESGGGLVQPGESLRLSCVVSGDIFS (SEQ ID NO: 594), FR2 contains the amino acid sequence WYRQAPGKQREVVA (SEQ ID NO: 595), FR3 contains the amino acid sequence RFAISRDNAKRTVYLQMNSLKFEDTAVYYCNV (SEQ ID NO: 596), and FR4 contains the amino acid sequence WGQGTQVTVSS (SEQ ID NO: 542);
[0115] aq) FR1 contains the amino acid sequence QVQLVESGGGLVQPGESLRLSCVVSGDIFS (SEQ ID NO: 597), FR2 contains the amino acid sequence WYRQAPGKQRELVA (SEQ ID NO: 574), FR3 contains the amino acid sequence RFTISRDNAKRTVYLQMNSLKFEDTAVYYCNF (SEQ ID NO: 598), and FR4 contains the amino acid sequence WGQGTQVTVSS (SEQ ID NO: 542);
[0116] ar) FR1 contains the amino acid sequence QVQLVESGGGLVQPGGSLRLSCAASGFTFS (SEQ ID NO: 599), FR2 contains the amino acid sequence WVRQAPGKRLEWVS (SEQ ID NO: 600), FR3 contains the amino acid sequence RFTISRDNADNTLYLHMNNLKPEDTAVYYCAN (SEQ ID NO: 601), and FR4 contains the amino acid sequence RGQGTQVTVSS (SEQ ID NO: 583);
[0117] as) FR1 contains the amino acid sequence QVQLVESGGGLVQPGGSLRLSCAASGFTFS (SEQ ID NO: 599), FR2 contains the amino acid sequence WVRQAPGKRLEWVS (SEQ ID NO: 600), FR3 contains the amino acid sequence RFTISRDNADNTLYLHMNNLKPEDTAVYYCAN (SEQ ID NO: 601), and FR4 contains the amino acid sequence RGQGTQVTVVS (SEQ ID NO: 622);
[0118] at) FR1 contains the amino acid sequence QVQLVESGGGLVQPGGSLRLSCAASGFTFS (SEQ ID NO: 599), FR2 contains the amino acid sequence WVRQAPGKRLEWVS (SEQ ID NO: 600), FR3 contains the amino acid sequence RFTISRDNADNTLYLHMNNLKPEDTAVYYCAN (SEQ ID NO: 601), and FR4 contains the amino acid sequence RGQGTQVTVSS (SEQ ID NO: 583); or
[0119] au) FR1 contains the amino acid sequence QVQLVESGGGLVQPGGSLRLSCVASGGTFS, FR2 contains the amino acid sequence WFRQAPGKEREFVA (SEQ ID NO: 539), FR3 contains the amino acid sequence RFTISRENAKNTVYLQMNTLKLEDTAVYYCVS (SEQ ID NO: 603), and FR4 contains the amino acid sequence WGQGTQVTVSS (SEQ ID NO: 542).

[0120] In any aspect of the disclosure, or embodiments thereof, the VHH antibody contains an amino acid sequence having at least 85% sequence identity to an amino acid sequence selected from one or more of:

```
  (SEQ ID NO: 431)
QVQLVESGGGLVQPGGSLRLSCAASGRTFINYAAGWFRQAPGKEREFVARISRSGGRTDYADSV
KGRFTISRDNAKSTVYLQMNSLRPEDTAVYYCAEATVWEFTDGADQYDYWGQGTQVTVSS;
(SEQ ID NO: 432)
EVQLVESGGGLVQAGGSLRLSCAASGRTFGSYTMGWFRQAPGKEREFVAAISWSAGRTYYADSM
KGRFTISRDNAKNTVYLQMNSLKPEDTAVYYCAADPWTSDSDYDRLTMYDYWGQGTQVTVSS;
(SEQ ID NO: 433)
EVQLVESGGGLVQAGGSLRLSCAASGRTFGTYTMGWFRQAPGKEREFVAAISWSAGRTYYADSM
KGRFTISRDNAKNTVYLQMNSLKPEDTAVYYCAADPWTSDSDYDRLTMYDYWGQGTQVTVSS;
(SEQ ID NO: 434)
QVQLQESGGGLVQAGGSLRLSCAASGRTFGSYTMGWFRQAPGKEREFVAAISWSAGRTYYADSM
KGRFTISRDNAKNTVYLQMNSLKPEDTAVYYCAADPWTSDSDYDRLTMYDYWGQGTQVTVSS;
(SEQ ID NO: 435)
QVQLQESGGGLVQAGGSLRLSCAASGRTFGTYTMGWFRQAPGKEREFVAAISWSAGRTYYADSM
KGRFTISRDNAKNTVYLQMNSLKPEDTAVYYCAADPWTSDSDYDRLTMYDYWGQGTQVTVSS;
(SEQ ID NO: 436)
QVQLQESGGGLVQAGGSLRLSCAASGRTFGTYTMGWFRQAPGKGREFVAAISWSAGRTYYADSM
KGRFTISRDNAKNTVYLQMNSLKPEDTAVYYCAADPWTSDSDYDRLTMYDYWGQGTQVTVSS;
(SEQ ID NO: 437)
QVQLVESGGGLVQAGGSLRLSCAASGRTFGSYTMGWFRQAPGKEREFVAAISWSAGRTYYADSM
KGRFTISRDNAKNTVYLQMNSLKPEDTAVYYCAADPWTSDSDYDRLTMYDYWGQGTQVTVSS;
(SEQ ID NO: 438)
QVQLVESGGGLVQAGGSLRLSCAASGRTFGTYTMGWFRQAPGKEREFVAAISWSAGRTYYADSM
KGRFTISRDNAKNTVYLQMNSLKPEDTAVYYCAADPWTSDSDYDRLTMYDYWGQGTQVTVSS;
(SEQ ID NO: 439)
QVQLVESGGGLVQAGGSLRLSCAASGRTFGTYTMGWFRQAPGREREFVAAISWSAGRTYYADSM
KGRFTISRDNAKNTVYLQMNSLKPEDTAVYYCAADPWTSDSDYDRLTMYDYWGQGTQVTVSS;
(SEQ ID NO: 440)
EVQLVESGGGLVQAGGSLRLSCAASGGTVSSYAMGWFRQAPGKEREFVAVISWSGGRTYYADSV
KGRFTISRDNAKNTVNLQMNSLKPEDTAVYYCAADPWTSDSDYERLTMYDYWGQGTQVTVSS;
(SEQ ID NO: 441)
EVQLVESGGGLVQAGGSRRLSCAASGGTVSSYAMGWFRQAPGKEREFVAVISWSGGRTYYADSV
KGRFTISRDNAKNTVYLQMNSLKPEDTAVYYCAADPWTSDSDYERLTMYDYWGQGTQVTVSS;
(SEQ ID NO: 442)
QVQLVESGGGLVQAGGSLRLSCAASGGTVSSYAMGWFRQAPGKEREFVAVISWSGGRTYYADSV
KGRFTISRDNAKNTVNLQMNSLKPEDTAVYYCAADPWTSDSDYERLTMYDYWGQGTQVTVSS;
(SEQ ID NO: 443)
QVQLVESGGGLVQAGGSLRLSCAASGGTVSSYAMGWFRQAPGKEREFVAVISWSGGRTYYADSV
KGRFTISRDNAKNTVYLQMNSLKPEDTAVYYCAADPWTSDSDYERLTMYDYWGQGTQVTVSS;
(SEQ ID NO: 444)
EVQLVESGGGLVQAGASLRLSCAASGRTTYNMGWFRHAPGKDREFVAAIDLYGRATRYANSVKG
RFTISRDNAKNTVYLQMNSLKPEDTAVYYCAADTSLPLGVLTESQRLYGAWGQGTQVTVSS;
(SEQ ID NO: 445)
QVQLQESGGGLVQAGASLRLSCAASGRATYNMGWFRHAPGEDREFVAAINLEGYATRYANSVKG
RFTISRDNAKNTVYLQMNSLKPEDTAVYYCAADTSLPLGVLTESQRLYGAWGQGTQVTVSS;
(SEQ ID NO: 446)
QVQLQESGGGLVQAGASLRLSCAASGRTTYNMGWFRHAPGKDREFVAAIDLYGRATRYANSVKG
RFTISRDNAKNTVYLQMNSLKPEDTAVYYCAADTSLPLGVLTESQRLYGAWGQGTQVTVSS;
(SEQ ID NO: 447)
QVQLQESGGGLVQAGASLRLSCAASGRTTYNMGWFRHAPGKDREFVAAIDLYGRATRYANSVRG
RFTISRDNAKNTVYLQMNSLKPEDTAVYYCAADTSLPLGVLTESQRLYGAWGQGTQVTVSS;
(SEQ ID NO: 448)
QVQLVESGGGLVQAGASLRLSCAASGRTTYNMGWFRHAPGKDREFVAAIDLYGRATRYANSVKG
RFTISRDNAKNTVYLQMNSLKPEDTAVYYCAADTSLPLGVLTESQRLYGAWGQGTQVTVSS;
(SEQ ID NO: 449)
QVQLVESGGGLVQAGASLRLSCAASGRTTYNMGWFRHAPGKDREFVAAIDLYGRATRYANSVKG
RFTISRDNAKNTVYLQMNSLKPEDTAVYYCAADTSLPLGVLTKSQRMYGAWGQGTQVTVSS;
  (SEQ ID NO: 450)
QVQLQESGGGSVQAGGSLRLSCAASGRAFSAYAMGWFRQAPGKEREFVAAINWNGDTALRWNGF
ATRYADSVKGRFIISRVNAKNTVNLQMNSLKPEDTAVYYCAADTVVSGSYYLAARAEDYEYWGQ
GTQVSVSS;
  (SEQ ID NO: 451)
QVQLQESGGGSVQAGGSLRLSCAASGRAFSAYAMGWFRQAPGKEREFVAAINWNGDTALRWNGF
ATRYADSVKGRFTISRVIAKNTVNLQMNSLKPEDTAVYYCAADTVVSGSYYLAARAEDYEYWGQ
GTQVTVSS;
  (SEQ ID NO: 452)
QVQLQESGGGSVQAGGSLRLSCAASGRAFSAYAMGWFRQAPGKEREFVAAINWNGDTALRWNGF
ATRYADSVKGRFTISRVNAKNTVNLQMNSLKPEDTAVYYCAADTVVSGSYYLAARAEDYEYWGQ
GTQVSVSS;
  (SEQ ID NO: 453)
QVQLQESGGGSVQAGGSLRLSCAASGRAFSAYAMGWFRQAPGKEREFVAAINWNGDTALRWNGF
ATRYADSVKGRFTISRVNAKNTVNLQMNSLKPEDTAVYYCAADTVVSGSYYLAARAEDYEYWGQ
GTQVTVSS;
  (SEQ ID NO: 454)
EVQLVESGGGLVQAGGSLRLSCAASGPAFSSSGMGWFRQAPGKARDFVASMDWSGGSTYYGDSV
KGRFTVSRDNAKNTVHLQMNSLRPEDTAVYYCARGTSGVAAVNLRGFFSWGPGTQVTVSS;
  (SEQ ID NO: 455)
QVQLQESGGGLVQAGGSLRLSCAASGPAFSSSGMGWFRQAPGKARDFVASIDWSGGSTYYGDSV
KGRFTVSRDNAKNTVHLQMNSLRPEDTAVYYCARGTSGVAAVNLRGFFSWGPGTQVTVSS;
  (SEQ ID NO: 456)
QVQLVESGGGLVQAGGSLRLACAASGAAFSSSGMGWFRQAPGKARDFVASMDWSGGSTYYGDSV
KGRFTVSRDNAKNTVHLQMNSLRPEDTAVYYCARGTSGVAAVNLRGFFSWGPGTQVTVSS;
  (SEQ ID NO: 457)
QVQLVESGGGLVQAGGSLRLSCAASGPAFSSSGMGWFRQAPGKARDFVASIDWGGGSTYYGDSV
KGRFTVSRDNAKNAVHLQMNSLRPEDTAVYYCARGTSGVAAVNLRGFFSWGPGTQVTVSS;
  (SEQ ID NO: 458)
QVQLVESGGGLVQAGGSLRLSCAASGPAFSSSGMGWFRQAPGKARDFVASIDWSGGSTYYGDSV
KGRFTVSRDNAKNTVHLQMNSLRPEDTAVYYCARGTSGVAAVNLRGFFSWGPGTQVTVSS;
  (SEQ ID NO: 459)
QVQLVESGGGLVQAGGSLRLSCAASGPAFSSSGMGWFRQAPGKARDFVASIDWSGKSTYYGDSV
KGRFTVSRDNAKNTVHLQMNSLRPEDTAVYYCARGTSGVAAVNLRGFFSWGPGTQVTVSS;
  (SEQ ID NO: 460)
QVQLVESGGGLVQAGGSLRLSCAASGPAFSSSGMGWFRQAPGKARDFVASINWSGGSAYYGDSV
KGRFTVSRDNAKNTVHLQMNSLRPEDTAVYYCARGTSGVAAVNLRGFFSWGPGTQVTVSS;
  (SEQ ID NO: 461)
QVQLVESGGGLVQAGGSLRLSCAASGPAFSSSGMGWFRQAPGKARDFVASMDWSGGSTYYGDSV
KGRFTVSRDNAKNTVHLQMNSLRPEDTAVYYCARGTSGVAAVNLRGFFSWGPGTQVTVSS;
  (SEQ ID NO: 462)
QVQLVESGGGLVQAGGSLRLSCAASGPAFSSSGMGWFRQAPGKAREFVASMDWTGGSTYYGDSV
KGRFTVSRDNAKMTVHLQMNSLRPEDTAVYYCARGTSGVAAVNLRGFFSWGPGTQVTVSS;
  (SEQ ID NO: 463)
QLQLVESGGGLVQPGGSLRLSCAASGSDFLVDATTWFRQAPGNQREFVAIMDIGGVTEYADSVK
GRFTISRDHTKNTVYLQMNSLKVEDTAVYYCNTRGLWGQGTLVTVSS;
  (SEQ ID NO: 464)
QVQLQESGGGLVQAGGSLRLSCATSGITSSINVIGWYRQAPGKQRELVALVNSGGQTHYADSVK
GRFTISRDNAKNTVFLQMNSLKPEDTAEYYCHGRYGIDNYWGEGTQVTVSS;
  (SEQ ID NO: 465)
EVQLVESGGGLVQPGGSLRLSCAASGFPFSSSFMSWVRQAPGKGLEWVSTIYSDGSTYYADSVK
GRFTISRDNAKKTAYLQMNSLKAEDTAVYYCATVTGSIRGQGTQVTVSS;
  (SEQ ID NO: 466)
QVQLVESGGGLVQPGGSLRLSCAASGFNFSSSFMSWVRQAPGKEVEWVSTIYSDGSTYYADSMK
GRFTISRDNAKNTVYLQMSNLKAEDTAVYYCATVTGSIRGQGTQVTVSS;
  (SEQ ID NO: 467)
QVQLVESGGGLVQPGGSVRLSCATSGSIFSTNVMGWYRQAPGKEREFVALIRGGGSTHYADSVK
GRFIISRENAKTTVYLQMNGLKPEDTAVYYCVIWLGSPGAMSDYWGQGTQVTVSS;
(SEQ ID NO: 468)
EVQLVESGGGLVQPGGSLRLSCAASGSVVSTNNMGWYRQAPGKEREFVALIRTGGSTHVADSMK
GRFTISRENAKNTVYLQMNSLKPEDTAVYYCVIWTGSPGALSDYWGQGTQVTVSS;
  (SEQ ID NO: 469)
QVQLVESGGGLVQPGGSLRLSCAASGSDASTNNMAWYRQAPGKEREFVALIRTGGSTHVADSMK
GRFTISRENAKNTVYLQMNSLKPEDTAVYYCVIWTGSPGALSDYWGQGTQVTVSS;
  (SEQ ID NO: 470)
QLQLVESGGGLVQPGESLRLSCAASGFSFSRVAMNWYRQAPGKERELVATISSDGSRTNYAHSV
KGRFTISRENAKNMVYLQMNSLKLEDTAVYYCNVPGNSWGQGTQVTVSS;
  (SEQ ID NO: 471)
QLQLVESGGGLVQPGESLRLSCAASGFSFSRVGMNWYRQAPGKERELVASISSDGSRTNYAHFV
KGRFTISRDNVKNMVYLQMNSLKLEDTAVYYCNVPGNSWGQGTQVTVSS;
  (SEQ ID NO: 472)
QLQLVESGGGLVQPGESLRLSCVVSGDIFSFVGWGWYRQAPGKQREVVAQISTGGLTNYADSVK
GRFAISRDNAKRTVYLQMNSLKFEDTAVYYCNVPGHPWGQGTQVTVSS;
  (SEQ ID NO: 473)
QVQLVESGGGLVQPGESLRLSCVVSGDIFSFIGWGWYRQAPGKQRELVAQINTGGLTDYADSVK
GRFTISRDNAKRTVYLQMNSLKFEDTAVYYCNFPGHSWGQGTQVTVSS;
  (SEQ ID NO: 474)
QVQLVESGGGLVQPGGSLRLSCAASGFTFSMYSMSWVRQAPGKRLEWVSSISTGARDTAYADSV
KGRFTISRDNADNTLYLHMNNLKPEDTAVYYCANGDLRYGPDGYDYRGQGTQVTVSS;
  (SEQ ID NO: 475)
QVQLVESGGGLVQPGGSLRLSCAASGFTFSMYSMSWVRQAPGKRLEWVSSISTGARDTAYADSV
KGRFTISRDNADNTLYLHMNNLKPEDTAVYYCANGDLRYGPDGYDYRGQGTQVTVVS;
  (SEQ ID NO: 476)
QVQLVESGGGLVQPGGSLRLSCAASGFTFSMYSMSWVRQAPGKRLEWVSSISTGARDTSYADSV
KGRFTISRDNADNTLYLHMNNLKPEDTAVYYCANGDLRYGPDGYDYRGQGTQVTVSS;
and
(SEQ ID NO: 477)
QVQLVESGGGLVQPGGSLRLSCVASGGTFSTYGMGWFRQAPGKEREFVAVITGSGVGTQYADSV
KDRFTISRENAKNTVYLQMNTLKLEDTAVYYCVSGHRPGWAVIRADAYEYWGQGTQVTVSS.
```

[0121] In any aspect of the disclosure, or embodiments thereof, the VHH antibody contains an amino acid sequence selected from one or more of:

```
  (SEQ ID NO: 431)
QVQLVESGGGLVQPGGSLRLSCAASGRTFINYAAGWFRQAPGKEREFVARISRSGGRTDYADSV
KGRFTISRDNAKSTVYLQMNSLRPEDTAVYYCAEATVWEFTDGADQYDYWGQGTQVTVSS;
(SEQ ID NO: 432)
EVQLVESGGGLVQAGGSLRLSCAASGRTFGSYTMGWFRQAPGKEREFVAAISWSAGRTYYADSM
KGRFTISRDNAKNTVYLQMNSLKPEDTAVYYCAADPWTSDSDYDRLTMYDYWGQGTQVTVSS;
(SEQ ID NO: 433)
EVQLVESGGGLVQAGGSLRLSCAASGRTFGTYTMGWFRQAPGKEREFVAAISWSAGRTYYADSM
KGRFTISRDNAKNTVYLQMNSLKPEDTAVYYCAADPWTSDSDYDRLTMYDYWGQGTQVTVSS;
(SEQ ID NO: 434)
QVQLQESGGGLVQAGGSLRLSCAASGRTFGSYTMGWFRQAPGKEREFVAAISWSAGRTYYADSM
KGRFTISRDNAKNTVYLQMNSLKPEDTAVYYCAADPWTSDSDYDRLTMYDYWGQGTQVTVSS;
(SEQ ID NO: 435)
QVQLQESGGGLVQAGGSLRLSCAASGRTFGTYTMGWFRQAPGKEREFVAAISWSAGRTYYADSM
KGRFTISRDNAKNTVYLQMNSLKPEDTAVYYCAADPWTSDSDYDRLTMYDYWGQGTQVTVSS;
(SEQ ID NO: 436)
QVQLQESGGGLVQAGGSLRLSCAASGRTFGTYTMGWFRQAPGKGREFVAAISWSAGRTYYADSM
KGRFTISRDNAKNTVYLQMNSLKPEDTAVYYCAADPWTSDSDYDRLTMYDYWGQGTQVTVSS;
(SEQ ID NO: 437)
QVQLVESGGGLVQAGGSLRLSCAASGRTFGSYTMGWFRQAPGKEREFVAAISWSAGRTYYADSM
KGRFTISRDNAKNTVYLQMNSLKPEDTAVYYCAADPWTSDSDYDRLTMYDYWGQGTQVTVSS;
(SEQ ID NO: 438)
QVQLVESGGGLVQAGGSLRLSCAASGRTFGTYTMGWFRQAPGKEREFVAAISWSAGRTYYADSM
KGRFTISRDNAKNTVYLQMNSLKPEDTAVYYCAADPWTSDSDYDRLTMYDYWGQGTQVTVSS;
(SEQ ID NO: 439)
QVQLVESGGGLVQAGGSLRLSCAASGRTFGTYTMGWFRQAPGREREFVAAISWSAGRTYYADSM
KGRFTISRDNAKNTVYLQMNSLKPEDTAVYYCAADPWTSDSDYDRLTMYDYWGQGTQVTVSS;
(SEQ ID NO: 440)
EVQLVESGGGLVQAGGSLRLSCAASGGTVSSYAMGWFRQAPGKEREFVAVISWSGGRTYYADSV
KGRFTISRDNAKNTVNLQMNSLKPEDTAVYYCAADPWTSDSDYERLTMYDYWGQGTQVTVSS;
(SEQ ID NO: 441)
EVQLVESGGGLVQAGGSRRLSCAASGGTVSSYAMGWFRQAPGKEREFVAVISWSGGRTYYADSV
KGRFTISRDNAKNTVYLQMNSLKPEDTAVYYCAADPWTSDSDYERLTMYDYWGQGTQVTVSS;
(SEQ ID NO: 442)
QVQLVESGGGLVQAGGSLRLSCAASGGTVSSYAMGWFRQAPGKEREFVAVISWSGGRTYYADSV
KGRFTISRDNAKNTVNLQMNSLKPEDTAVYYCAADPWTSDSDYERLTMYDYWGQGTQVTVSS;
(SEQ ID NO: 443)
QVQLVESGGGLVQAGGSLRLSCAASGGTVSSYAMGWFRQAPGKEREFVAVISWSGGRTYYADSV
KGRFTISRDNAKNTVYLQMNSLKPEDTAVYYCAADPWTSDSDYERLTMYDYWGQGTQVTVSS;
(SEQ ID NO: 444)
EVQLVESGGGLVQAGASLRLSCAASGRTTYNMGWFRHAPGKDREFVAAIDLYGRATRYANSVKG
RFTISRDNAKNTVYLQMNSLKPEDTAVYYCAADTSLPLGVLTESQRLYGAWGQGTQVTVSS;
(SEQ ID NO: 445)
QVQLQESGGGLVQAGASLRLSCAASGRATYNMGWFRHAPGEDREFVAAINLEGYATRYANSVKG
RFTISRDNAKNTVYLQMNSLKPEDTAVYYCAADTSLPLGVLTESQRLYGAWGQGTQVTVSS;
(SEQ ID NO: 446)
QVQLQESGGGLVQAGASLRLSCAASGRTTYNMGWFRHAPGKDREFVAAIDLYGRATRYANSVKG
RFTISRDNAKNTVYLQMNSLKPEDTAVYYCAADTSLPLGVLTESQRLYGAWGQGTQVTVSS;
(SEQ ID NO: 447)
QVQLQESGGGLVQAGASLRLSCAASGRTTYNMGWFRHAPGKDREFVAAIDLYGRATRYANSVRG
RFTISRDNAKNTVYLQMNSLKPEDTAVYYCAADTSLPLGVLTESQRLYGAWGQGTQVTVSS;
(SEQ ID NO: 448)
QVQLVESGGGLVQAGASLRLSCAASGRTTYNMGWFRHAPGKDREFVAAIDLYGRATRYANSVKG
RFTISRDNAKNTVYLQMNSLKPEDTAVYYCAADTSLPLGVLTESQRLYGAWGQGTQVTVSS;
(SEQ ID NO: 449)
QVQLVESGGGLVQAGASLRLSCAASGRTTYNMGWFRHAPGKDREFVAAIDLYGRATRYANSVKG
RFTISRDNAKNTVYLQMNSLKPEDTAVYYCAADTSLPLGVLTKSQRMYGAWGQGTQVTVSS;
  (SEQ ID NO: 450)
QVQLQESGGGSVQAGGSLRLSCAASGRAFSAYAMGWFRQAPGKEREFVAAINWNGDTALRWNGF
ATRYADSVKGRFIISRVNAKNTVNLQMNSLKPEDTAVYYCAADTVVSGSYYLAARAEDYEYWGQ
GTQVSVSS;
  (SEQ ID NO: 451)
QVQLQESGGGSVQAGGSLRLSCAASGRAFSAYAMGWFRQAPGKEREFVAAINWNGDTALRWNGF
ATRYADSVKGRFTISRVIAKNTVNLQMNSLKPEDTAVYYCAADTVVSGSYYLAARAEDYEYWGQ
GTQVTVSS;
  (SEQ ID NO: 452)
QVQLQESGGGSVQAGGSLRLSCAASGRAFSAYAMGWFRQAPGKEREFVAAINWNGDTALRWNGF
ATRYADSVKGRFTISRVNAKNTVNLQMNSLKPEDTAVYYCAADTVVSGSYYLAARAEDYEYWGQ
GTQVSVSS;
  (SEQ ID NO: 453)
QVQLQESGGGSVQAGGSLRLSCAASGRAFSAYAMGWFRQAPGKEREFVAAINWNGDTALRWNGF
ATRYADSVKGRFTISRVNAKNTVNLQMNSLKPEDTAVYYCAADTVVSGSYYLAARAEDYEYWGQ
GTQVTVSS;
  (SEQ ID NO: 454)
EVQLVESGGGLVQAGGSLRLSCAASGPAFSSSGMGWFRQAPGKARDFVASMDWSGGSTYYGDSV
KGRFTVSRDNAKNTVHLQMNSLRPEDTAVYYCARGTSGVAAVNLRGFFSWGPGTQVTVSS;
  (SEQ ID NO: 455)
QVQLQESGGGLVQAGGSLRLSCAASGPAFSSSGMGWFRQAPGKARDFVASIDWSGGSTYYGDSV
KGRFTVSRDNAKNTVHLQMNSLRPEDTAVYYCARGTSGVAAVNLRGFFSWGPGTQVTVSS;
  (SEQ ID NO: 456)
QVQLVESGGGLVQAGGSLRLACAASGAAFSSSGMGWFRQAPGKARDFVASMDWSGGSTYYGDSV
KGRFTVSRDNAKNTVHLQMNSLRPEDTAVYYCARGTSGVAAVNLRGFFSWGPGTQVTVSS;
  (SEQ ID NO: 457)
QVQLVESGGGLVQAGGSLRLSCAASGPAFSSSGMGWFRQAPGKARDFVASIDWGGGSTYYGDSV
KGRFTVSRDNAKNAVHLQMNSLRPEDTAVYYCARGTSGVAAVNLRGFFSWGPGTQVTVSS;
  (SEQ ID NO: 458)
QVQLVESGGGLVQAGGSLRLSCAASGPAFSSSGMGWFRQAPGKARDFVASIDWSGGSTYYGDSV
KGRFTVSRDNAKNTVHLQMNSLRPEDTAVYYCARGTSGVAAVNLRGFFSWGPGTQVTVSS;
  (SEQ ID NO: 459)
QVQLVESGGGLVQAGGSLRLSCAASGPAFSSSGMGWFRQAPGKARDFVASIDWSGKSTYYGDSV
KGRFTVSRDNAKNTVHLQMNSLRPEDTAVYYCARGTSGVAAVNLRGFFSWGPGTQVTVSS;
  (SEQ ID NO: 460)
QVQLVESGGGLVQAGGSLRLSCAASGPAFSSSGMGWFRQAPGKARDFVASINWSGGSAYYGDSV
KGRFTVSRDNAKNTVHLQMNSLRPEDTAVYYCARGTSGVAAVNLRGFFSWGPGTQVTVSS;
  (SEQ ID NO: 461)
QVQLVESGGGLVQAGGSLRLSCAASGPAFSSSGMGWFRQAPGKARDFVASMDWSGGSTYYGDSV
KGRFTVSRDNAKNTVHLQMNSLRPEDTAVYYCARGTSGVAAVNLRGFFSWGPGTQVTVSS;
  (SEQ ID NO: 462)
QVQLVESGGGLVQAGGSLRLSCAASGPAFSSSGMGWFRQAPGKAREFVASMDWTGGSTYYGDSV
KGRFTVSRDNAKMTVHLQMNSLRPEDTAVYYCARGTSGVAAVNLRGFFSWGPGTQVTVSS;
  (SEQ ID NO: 463)
QLQLVESGGGLVQPGGSLRLSCAASGSDFLVDATTWFRQAPGNQREFVAIMDIGGVTEYADSVK
GRFTISRDHTKNTVYLQMNSLKVEDTAVYYCNTRGLWGQGTLVTVSS;
  (SEQ ID NO: 464)
QVQLQESGGGLVQAGGSLRLSCATSGITSSINVIGWYRQAPGKQRELVALVNSGGQTHYADSVK
GRFTISRDNAKNTVFLQMNSLKPEDTAEYYCHGRYGIDNYWGEGTQVTVSS;
  (SEQ ID NO: 465)
EVQLVESGGGLVQPGGSLRLSCAASGFPFSSSFMSWVRQAPGKGLEWVSTIYSDGSTYYADSVK
GRFTISRDNAKKTAYLQMNSLKAEDTAVYYCATVTGSIRGQGTQVTVSS;
  (SEQ ID NO: 466)
QVQLVESGGGLVQPGGSLRLSCAASGFNFSSSFMSWVRQAPGKEVEWVSTIYSDGSTYYADSMK
GRFTISRDNAKNTVYLQMSNLKAEDTAVYYCATVTGSIRGQGTQVTVSS;
  (SEQ ID NO: 467)
QVQLVESGGGLVQPGGSVRLSCATSGSIFSTNVMGWYRQAPGKEREFVALIRGGGSTHYADSVK
GRFIISRENAKTTVYLQMNGLKPEDTAVYYCVIWLGSPGAMSDYWGQGTQVTVSS;
  (SEQ ID NO: 468)
EVQLVESGGGLVQPGGSLRLSCAASGSVVSTNNMGWYRQAPGKEREFVALIRTGGSTHVADSMK
GRFTISRENAKNTVYLQMNSLKPEDTAVYYCVIWTGSPGALSDYWGQGTQVTVSS;
  (SEQ ID NO: 469)
QVQLVESGGGLVQPGGSLRLSCAASGSDASTNNMAWYRQAPGKEREFVALIRTGGSTHVADSMK
GRFTISRENAKNTVYLQMNSLKPEDTAVYYCVIWTGSPGALSDYWGQGTQVTVSS;
  (SEQ ID NO: 470)
QLQLVESGGGLVQPGESLRLSCAASGFSFSRVAMNWYRQAPGKERELVATISSDGSRTNYAHSV
KGRFTISRENAKNMVYLQMNSLKLEDTAVYYCNVPGNSWGQGTQVTVSS;
  (SEQ ID NO: 471)
QLQLVESGGGLVQPGESLRLSCAASGFSFSRVGMNWYRQAPGKERELVASISSDGSRTNYAHFV
KGRFTISRDNVKNMVYLQMNSLKLEDTAVYYCNVPGNSWGQGTQVTVSS;
  (SEQ ID NO: 472)
QLQLVESGGGLVQPGESLRLSCVVSGDIFSFVGWGWYRQAPGKQREVVAQISTGGLTNYADSVK
GRFAISRDNAKRTVYLQMNSLKFEDTAVYYCNVPGHPWGQGTQVTVSS;
  (SEQ ID NO: 473)
QVQLVESGGGLVQPGESLRLSCVVSGDIFSFIGWGWYRQAPGKQRELVAQINTGGLTDYADSVK
GRFTISRDNAKRTVYLQMNSLKFEDTAVYYCNFPGHSWGQGTQVTVSS;
  (SEQ ID NO: 474)
QVQLVESGGGLVQPGGSLRLSCAASGFTFSMYSMSWVRQAPGKRLEWVSSISTGARDTAYADSV
KGRFTISRDNADNTLYLHMNNLKPEDTAVYYCANGDLRYGPDGYDYRGQGTQVTVSS;
  (SEQ ID NO: 475)
QVQLVESGGGLVQPGGSLRLSCAASGFTFSMYSMSWVRQAPGKRLEWVSSISTGARDTAYADSV
KGRFTISRDNADNTLYLHMNNLKPEDTAVYYCANGDLRYGPDGYDYRGQGTQVTVVS;
  (SEQ ID NO: 476)
QVQLVESGGGLVQPGGSLRLSCAASGFTFSMYSMSWVRQAPGKRLEWVSSISTGARDTSYADSV
KGRFTISRDNADNTLYLHMNNLKPEDTAVYYCANGDLRYGPDGYDYRGQGTQVTVSS;
and
(SEQ ID NO: 477)
QVQLVESGGGLVQPGGSLRLSCVASGGTFSTYGMGWFRQAPGKEREFVAVITGSGVGTQYADSV
KDRFTISRENAKNTVYLQMNTLKLEDTAVYYCVSGHRPGWAVIRADAYEYWGQGTQVTVSS.
```

[0122] In any aspect of the disclosure, or embodiments thereof, the lipid nanoparticle is conjugated to the VHH antibody. In any aspect of the disclosure, or embodiments thereof, the VHH antibody is covalently bound to a polyethylene glycol (PEG) molecule of the lipid nanoparticle. In any aspect of the disclosure, or embodiments thereof, the VHH antibody is covalently bound to a PEG portion of a PEG-modified lipid of the lipid nanoparticle.

[0123] In any aspect of the disclosure, or embodiments thereof, the lipid nanoparticle contains a polynucleotide encoding a chimeric antigen receptor.

[0124] In any aspect of the disclosure, or embodiments thereof, the chimeric antigen receptor contains an antigen binding domain capable of binding a marker associated with a neoplasia.

[0125] In any aspect of the disclosure, or embodiments thereof, the carrier or excipient is a pharmaceutical carrier or excipient.

[0126] In any aspect of the disclosure, or embodiments thereof, the neoplasia is a B cell lymphoma or a T cell lymphoma.

[0127] In any aspect of the disclosure, or embodiments thereof, the T cell lymphoma is a T-cell acute lymphoblastic leukemia.

### Definitions

[0128] Unless defined otherwise, all technical and scientific terms used herein have the meaning commonly understood by a person skilled in the art to which this disclosure belongs. The following references provide one of skill with a general definition of many of the terms used in this disclosure: Singleton et al., Dictionary of Microbiology and Molecular Biology (2nd ed. 1994); The Cambridge Dictionary of Science and Technology (Walker ed., 1988); The Glossary of Genetics, 5th Ed., R. Rieger et al. (eds.), Springer Verlag (1991); and Hale & Marham, The Harper Collins Dictionary of Biology (1991). As used herein, the following terms have the meanings ascribed to them below, unless specified otherwise.

[0129] By “adenine” or “9H-Purin-6-amine” is meant a purine nucleobase with the molecular formula C₅H₅N₅, having the structure

[chemical structure]

and corresponding to CAS No. 73-24-5.

[0130] By “adenosine” or “4-Amino-1-[(2R,3R,4S,5R)-3,4-dihydroxy-5-(hydroxymethyl)oxolan-2-yl]pyrimidin-2(1H)-one” is meant an adenine molecule attached to a ribose sugar via a glycosidic bond, having the structure

[chemical structure]

and corresponding to CAS No. 65-46-3. Its molecular formula is C₁₀H₁₃N₅O₄.

[0131] By “adenosine deaminase” or “adenine deaminase” is meant a polypeptide or fragment thereof capable of catalyzing the hydrolytic deamination of adenine or adenosine. In some embodiments, the deaminase or deaminase domain is an adenosine deaminase catalyzing the hydrolytic deamination of adenosine to inosine or deoxy adenosine to deoxyinosine. In some embodiments, the adenosine deaminase catalyzes the hydrolytic deamination of adenine or adenosine in deoxyribonucleic acid (DNA). The adenosine deaminases (e.g., engineered adenosine deaminases, evolved adenosine deaminases) provided herein may be from any organism (e.g., eukaryotic, prokaryotic), including but not limited to algae, bacteria, fungi, plants, invertebrates (e.g., insects), and vertebrates (e.g., amphibians, mammals). In some embodiments, the adenosine deaminase is an adenosine deaminase variant with one or more alterations and is capable of deaminating both adenine and cytosine in a target polynucleotide (e.g., DNA, RNA) and may be referred to as a “dual deaminase”. Non-limiting examples of dual deaminases include those described in PCT/US22/22050. In some embodiments, the target polynucleotide is single or double stranded. In some embodiments, the adenosine deaminase variant is capable of deaminating both adenine and cytosine in DNA. In some embodiments, the adenosine deaminase variant is capable of deaminating both adenine and cytosine in single-stranded DNA. In some embodiments, the adenosine deaminase variant is capable of deaminating both adenine and cytosine in RNA. In embodiments, the adenosine deaminase variant is selected from those described in PCT/US2020/018192, PCT/US2020/049975, PCT/US2017/045381, PCT/US2021/016827, PCT/US2022/073781, PCT/US24/34189, or PCT/US2020/028568, the full contents of which are each incorporated herein by reference in their entireties for all purposes. Further non-limiting examples of adenosine deaminases include those disclosed or referenced in Rufflow, et al., “Design of highly functional genome editors by modeling of the universe of CRISPR-Cas Sequences,” bioRxiv, posted Apr. 22, 2024, doi: 10.1101/2024.04.22.590591, the disclosure of which is incorporated herein by reference in its entirety for all purposes, which were designed using artificial intelligence. Further exemplary adenosine deaminase amino acid sequences include: TadA-8e (SEQ ID NO: 628), Tad1 (SEQ ID NO: 629), Tad2 (SEQ ID NO: 630), Tad3 (SEQ ID NO: 631), Tad4 (SEQ ID NO: 632), Tad6 (SEQ ID NO: 633), Tad6-SR (SEQ ID NO: 634), TadA9 (SEQ ID NO: 635), TadA20 (SEQ ID NO: 636), Staphylococcus aureus TadA (SEQ ID NO: 637), Bacillus subtilis TadA (SEQ ID NO: 638), Salmonella typhimurium TadA (SEQ ID NO: 639), Shewanella putrefaciens (SEQ ID NO: 640), Haemophilus influenzae F3031 TadA (SEQ ID NO: 641), Caulobacter crescentus TadA (SEQ ID NO: 642), Geobacter sulfurreducens TadA (SEQ ID NO: 643), Streptococcus pyogenes TadA (SEQ ID NO: 644), Aquifex aeolicus TadA (SEQ ID NO: 645), and E. coli TadA deaminase (ecTadA) (SEQ ID NO: 646).

[0132] By “adenosine deaminase activity” is meant catalyzing the deamination of adenine or adenosine to guanine in a polynucleotide.

[0133] By “Adenosine Base Editor (ABE)” is meant a base editor comprising an adenosine deaminase.

[0134] By “Adenosine Base Editor (ABE) polynucleotide” is meant a polynucleotide encoding an ABE.

[0135] By “Adenosine Base Editor 8 (ABE8) polypeptide” or “ABE8” is meant a base editor as defined herein comprising an adenosine deaminase or adenosine deaminase variant comprising one or more of the alterations listed in Table 5B, one of the combinations of alterations listed in Table 5B, or an alteration at one or more of the amino acid positions listed in Table 5B, where such alterations are relative to the following reference sequence: MSEVEFSHEYWMRHALTLAKRARDEREVPVGAVLVLNNRVIGEGWNRAIGLHDPTAHAEIMALR QGGLVMQNYRLIDATLYVTFEPCVMCAGAMIHSRIGRVVFGVRNAKTGAAGSLMDVLHYPGMNH RVEITEGILADECAALLCYFFRMPRQVFNAQKKAQSSTD (SEQ ID NO: 1), or a corresponding position in another adenosine deaminase. In embodiments, ABE8 comprises alterations at amino acids 82 and/or 166 of SEQ ID NO: 1. In some embodiments, ABE8 comprises further alterations, as described herein, relative to the reference sequence.

[0136] By “Adenosine Base Editor 8 (ABE8) polynucleotide” is meant a polynucleotide encoding an ABE8 polypeptide.

[0137] “Administering” is referred to herein as providing one or more compositions described herein to a patient or a subject. By way of example and without limitation, composition administration (e.g., injection) can be performed by intravenous (i.v.) injection, sub-cutaneous (s.c.) injection, intradermal (i.d.) injection, intraperitoneal (i.p.) injection, or intramuscular (i.m.) injection. One or more such routes can be employed. Parenteral administration can be, for example, by bolus injection or by gradual perfusion over time. In some embodiments, parenteral administration includes infusing or injecting intravascularly, intravenously, intramuscularly, intraarterially, intrathecally, intratumorally, intradermally, intraperitoneally, transtracheally, subcutaneously, subcuticularly, intraarticularly, subcapsularly, subarachnoidly and intrasternally. Alternatively, or concurrently, administration can be by the oral route.

[0138] By “agent” is meant any small molecule chemical compound, antibody, nucleic acid molecule, or polypeptide, or fragments thereof.

[0139] “Allogeneic,” as used herein, refers to cells that are genetically dissimilar and immunologically incompatible. In embodiments, allogeneic cells are administered to a genetically dissimilar and immunologically incompatible subject. In some embodiments, the allogeneic cells comprise modifications improving their persistence in the subject allogeneic to the cells.

[0140] By “alteration” is meant a change in the level, structure, or activity of an analyte, gene or polypeptide as detected by standard art known methods, such as those described herein. As used herein, an alteration includes a change (e.g., increase or reduction) in expression levels. In embodiments, the increase or reduction in expression levels is by 10%, 25%, 40%, 50% or greater. In some embodiments, an alteration (e.g., in structure) includes an insertion, deletion, or substitution of a nucleobase or amino acid (e.g., by genetic engineering).

[0141] By “ameliorate” is meant reduce, suppress, attenuate, diminish, arrest, or stabilize the development or progression of a disease.

[0142] By “analog” is meant a molecule that is not identical but has analogous functional or structural features. For example, a polypeptide analog retains the biological activity of a corresponding naturally-occurring polypeptide, while having certain biochemical modifications that enhance the analog's function relative to a naturally occurring polypeptide. Such biochemical modifications could increase the analog's protease resistance, membrane permeability, or half-life, without altering, for example, ligand binding. An analog may include an unnatural amino acid.

[0143] By “anionic lipid” is meant a lipid species that carries a net negative charge at a selected pH.

[0144] As used herein, the term “antibody” or “antigen-binding domain” refers to an immunoglobulin molecule, a single-domain antibody (sdAb), or a fragment thereof that specifically binds to, or is immunologically reactive with, a particular antigen. Non-limiting examples of antibodies or antigen-binding domains include VHH antibodies, polyclonal, monoclonal, genetically engineered and otherwise modified forms of antibodies, including but not limited to chimeric antibodies, humanized antibodies, heteroconjugate antibodies (e.g., bi- tri- and quad-specific antibodies, diabodies, triabodies, and tetrabodies), and antigen-binding fragments of antibodies, including e.g., Fab′, F(ab′)2, Fab, Fv, rIgG, and scFv fragments, as well as engineered antibodies, which include CrossMabs (e.g., CrossMab^{Fabs}, CrossMab^{CH1-CL} and CrossMab^{VH-VL} formats), or fragments thereof. Moreover, unless otherwise indicated, the term “monoclonal antibody” (mAb) is meant to include both intact molecules, as well as antibody fragments (such as, for example, Fab and F(ab′)2 fragments) that are capable of specifically binding to a target protein. Fab and F(ab′)₂ fragments lack the Fc fragment of an intact antibody, clear more rapidly from the circulation of the animal, and may have less non-specific tissue binding than an intact antibody (see Wahl et al., J. Nucl. Med. 24:316, 1983; incorporated herein by reference).

[0145] Antibody structure is well known in the art. Briefly, the variable (V) regions or domains of antibody heavy (H) and light (L) chains contain Complementarity-Determining Regions (CDRs), which bind to specific antigens or immunogens (e.g., protein antigens or immunogens). CDRs are situated within framework (FR) sequences of the V regions of the heavy (V_{H}) and light chains (V_{L}) of an antibody. CDRs are the most variable parts of antibodies and are critical components in the diversity of antigen specificities of antibodies produced by B lymphocytes. In general, three CDRs (CDR1, CDR2 and CDR3) are arranged consecutively in a V domain of an antibody. Because a VHH, such as a camelid VHH, is essentially a single chain antibody polypeptide, it contains three CDRs that bind to an antigen or target protein such as CD5 in the context of four framework (FR) regions, as follows: FR1-CDR1-FR2-CDR2-FR3-CDR3-FR4. Because most of the sequence variability associated with immunoglobulins and antigen binding is found in the CDRs, these regions are sometimes referred to as hypervariable regions. Typically, CDR1, CDR2 and CDR3 of VHHs contribute to and/or do not interfere with antigen binding. The CDRs of a number of anti-CD5 VHHs described herein are shown, for example, in Tables 1A and 1B.

[0146] By “antigen” is meant an agent to which an antibody or other polypeptide capture molecule specifically binds. In an embodiment, the antigen is a tumor antigen. Exemplary antigens include small molecules, carbohydrates, proteins, and polynucleotides.

[0147] By “base editor (BE),” or “nucleobase editor polypeptide (NBE)” is meant an agent that binds a polynucleotide and has nucleobase modifying activity. In various embodiments, the base editor comprises a nucleobase modifying polypeptide (e.g., a deaminase) and a polynucleotide programmable nucleotide binding domain (e.g., Cas9 or Cpf1). Representative nucleic acid and protein sequences of base editors include those sequences having about or at least about 85% sequence identity to any base editor sequence provided in the sequence listing, such as those corresponding to SEQ ID NOs: 2-11.

[0148] By “BE4 cytidine deaminase (BE4) polypeptide,” is meant a base editor comprising a nucleic acid programmable DNA binding protein (napDNAbp) domain, a cytidine deaminase domain, and two uracil glycosylase inhibitor domains (UGIs). In embodiments, the napDNAbp is a Cas9n (D10A) polypeptide. Non-limiting examples of cytidine deaminase domains include rAPOBEC, ppAPOBEC, RrA3F, AmAPOBEC1, and SsAPOBEC3B.

[0149] By “BE4 cytidine deaminase (BE4) polynucleotide,” is meant a polynucleotide encoding a BE4 polypeptide.

[0150] By “base editing activity” is meant acting to chemically alter a base within a polynucleotide. In one embodiment, a first base is converted to a second base. In one embodiment, the base editing activity is cytidine deaminase activity, e.g., converting target C·G to T·A. In another embodiment, the base editing activity is adenosine or adenine deaminase activity, e.g., converting A·T to G·C.

[0151] The term “base editor system” refers to an intermolecular complex for editing a nucleobase of a target nucleotide sequence. In various embodiments, the base editor (BE) system comprises (1) a polynucleotide programmable nucleotide binding domain, a deaminase domain (e.g., cytidine deaminase or adenosine deaminase) for deaminating nucleobases in the target nucleotide sequence; and (2) one or more guide polynucleotides (e.g., guide RNA) in conjunction with the polynucleotide programmable nucleotide binding domain. In various embodiments, the base editor (BE) system comprises a nucleobase editor domain selected from an adenosine deaminase or a cytidine deaminase, and a domain having nucleic acid sequence specific binding activity. In some embodiments, the base editor system comprises (1) a base editor (BE) comprising a polynucleotide programmable DNA binding domain and a deaminase domain for deaminating one or more nucleobases in a target nucleotide sequence; and (2) one or more guide RNAs in conjunction with the polynucleotide programmable DNA binding domain. In some embodiments, the polynucleotide programmable nucleotide binding domain is a polynucleotide programmable DNA binding domain. In some embodiments, the base editor is a cytidine base editor (CBE). In some embodiments, the base editor is an adenine or adenosine base editor (ABE). In some embodiments, the base editor is an adenine or adenosine base editor (ABE) or a cytidine or cytosine base editor (CBE). In some embodiments, the base editor system (e.g., a base editor system comprising a cytidine deaminase) comprises a uracil glycosylase inhibitor or other agent or peptide (e.g., a uracil stabilizing protein such as provided in WO2022015969, the disclosure of which is incorporated herein by reference in its entirety for all purposes) that inhibits the inosine base excision repair system.

[0152] A “camelid VHH framework region (FR)” refers to the structural FR portions or components of a camelid VHH antibody or binding molecule, namely, FR1, FR2, FR4 and FR4, that positionally and structurally support the three CDR components, namely, CDR1, CDR2 and CDR3 of a VHH polypeptide, as described above. Similar to the FRs in conventional antibody polypeptides, the respective FR regions (FR1, FR2, FR3 and FR4) of the anti-CD5 VHH polypeptides described herein are highly similar in sequence not only among different CD5 binding VHHs but also among camelid VHH polypeptides that bind to other antigens, e.g., unrelated VHH polypeptides. (See, e.g., L. S. Mitchell and L. J. Colwell, 2018, Proteins, 86(7): 697-706 and A. M. Vattekatte et al., March 2020, PeerJ., 6(8): e8408. DOI: 10.7717/peerj.8408). Accordingly, the FR regions FR1, FR2, FR3 and FR4 of different VHHs do not vary significantly in sequence. By way of example, the below FR sequences of the VHH in the above-mentioned publication of Mitchell and Colwell are similar to the FR sequences of other VHHs, including the anti-CD5 VHH polypeptides described herein.

FR1 (SEQ ID NO: 625):

| Position | | | | | | | | | | | | | |
|---|---|---|---|---|---|---|---|---|---|---|---|---|---|
| # | 1 | 2 | 3 | 4 | 5 | 6 | 7 | 8 | 9 | 10 | 11 | 12 | 13 |
| AA | Q | V | Q | | Q | E | S | G | G | G | L | V | Q |
| | | | | | or | | | | | | or | | |
| | | | | | V | | | | | | S | | |

FR1 (continued)

| Position | | | | | | | | | | | | |
|---|---|---|---|---|---|---|---|---|---|---|---|---|
| # | 14 | 15 | 16 | 17 | 18 | 19 | 20 | 21 | 22 | 23 | 24 | 25 |
| AA | A | G | G | S | L | R | L | S | C | A | A | S |
| | or | | | | | | | | | | | |
| | P | | | | | | | | | | | |

FR2 (SEQ ID NO: 626):

| Position | | | | | | | | | | | | | | |
|---|---|---|---|---|---|---|---|---|---|---|---|---|---|---|
| # | 36 | 37 | 38 | 39 | 40 | 41 | 42 | 43 | 44 | 45 | 46 | 47 | 48 | 49 |
| AA | W | F, | R | Q | A | P | G | K | E, | R | E | F, | V | A, |
| | | Y, | | | | | | | C, | or | | G, | | S, |
| | | or | | | | | | | or | L | | L, | | or |
| | | V | | | | | | | G | | | or | | T |
| | | | | | | | | | | | | W | | |

FR3 (SEQ ID NO: 627):

| Position | | | | | | | | | | | | | | | | | | | |
|---|---|---|---|---|---|---|---|---|---|---|---|---|---|---|---|---|---|---|---|
| # | 60 | 61 | 62 | 63 | 64 | 65 | 66 | 67 | 68 | 69 | 70 | 71 | 72 | 73 | 74 | 75 | 76 | 77 | 78 |
| AA | Y | A, | D | S | V | K | G | R | F | T | I | S | R | D | N | A | K | N | T |
| | | Q, | or | | or | | | | | or | or | | or | | or | | or | | |
| | | T, | E | | A | | | | | A | V | | Q | | K | | A | | |
| | | or | | | | | | | | | | | | | | | | | |
| | | V | | | | | | | | | | | | | | | | | |

FR3 (continued):

| Position | | | | | | | | | | | | | | | | | | |
|---|---|---|---|---|---|---|---|---|---|---|---|---|---|---|---|---|---|---|
| # | 79 | 80 | 81 | 82 | 83 | 84 | 85 | 86 | 87 | 88 | 89 | 90 | 91 | 92 | 93 | 94 | 95 | 96 |
| AA | V, | Y | L | Q | M | N | S | L | K | P | E | D | T | A | V, | Y | Y | C |
| | L, | | | | | or | or | | or | | or | | | or | I, | | | |
| | or | | | | | D | N | | R | | D | | | G | T, | | | |
| | M | | | | | | | | | | | | | | or | | | |
| | | | | | | | | | | | | | | | M | | | |

FR4 (SEQ ID NO: 542):

| Position | | | | | | | | | | | |
|---|---|---|---|---|---|---|---|---|---|---|---|
| # | 117 | 118 | 119 | 120 | 121 | 122 | 123 | 124 | 125 | 126 | 127 |
| AA | W | G | Q | G | T | Q | V | T | V | S | S |

[0153] It will be appreciated that the amino acid position numbers of the VHH FRs shown above are approximate and may vary to some degree in length or amino acid sequence depending on VHH length and on the start and termination amino acid positions of the VHH CDRs. Thus, substantial similarities exist among the structural FRs of camelid VHHs, independent of antigen binding specificity.

[0154] The term “Cas9” or “Cas9 domain” refers to an RNA guided nuclease comprising a Cas9 protein, or a fragment thereof (e.g., a protein comprising an active, inactive, or partially active DNA cleavage domain of Cas9, and/or the gRNA binding domain of Cas9). A Cas9 nuclease is also referred to sometimes as a casnl nuclease or a CRISPR (clustered regularly interspaced short palindromic repeat) associated nuclease.

[0155] By “chimeric antigen receptor” or “CAR” is meant a synthetic or engineered receptor comprising an extracellular antigen binding domain joined to one or more intracellular signaling domains (e.g., T cell signaling domain) that confers specificity for an antigen onto an immune effector cell (e.g., a T-cell, an NK cell, or a macrophage). In embodiments, the CAR is a SUPRA CAR, an anti-tag CAR, a TCR-CAR, or a TCR-like CAR (see, e.g., Guedan, et al. “Engineering and Design of Chimeric Antigen Receptors,” Methods and Clinical Development, 12:145-156 (2019); Poorebrahim, et al., “TCR-like CARs and TCR-CARs targeting neoepitopes: an emerging potential,” Cancer Gene Therapy, 28:581-589 (2021); and Minutolo, et al. “The Emergence of Universal Immune Receptor T Cell Therapy for Cancer,” Front Oncol., 9:176 (2019), the disclosures of which are incorporated herein by reference in their entireties for all purposes).

[0156] By “chimeric antigen receptor (CAR) T cell” or “CAR-T cell” is meant a T cell expressing a CAR that has antigen specificity determined by the antibody-derived targeting domain of the CAR. As used herein, “CAR-T cells” includes T cells, regulatory T cells (TREG), macrophages, or NK cells. As used herein, “CAR-T cells” include cells engineered to express a CAR or a T cell receptor (TCR, sometimes referred to as TCR-CARs or TCR-like CARs). Methods of making CARs (e.g., for treatment of cancer) are publicly available (see, e.g., Park et al., Trends Biotechnol., 29:550-557, 2011; Grupp et al., N Engl J Med., 368:1509-1518, 2013; Han et al., J. Hematol Oncol. 6:47, 2013; Haso et al., (2013) Blood, 121, 1165-1174; Mohseni, et al., (2020) Front. Immunol., 11, art. 1608, doi: 10.3389/fimmu.2020.01608; Eggenhuizen, et al. Int. J. Mol. Sci. (2020), 21:7015, doi: 10.3390/ijms21197015; Poorebrahim, et al., Cancer Gene Ther 28, 581-589 (2021), doi.org/10.1038/s41417-021-00307-7, PCT Pubs. WO2012/079000, WO2013/059593; and U.S. Pub. 2012/0213783, the disclosure of each of which is incorporated herein by reference herein in its entirety).

[0157] By “cluster of differentiation 5 (CD5) polypeptide” is meant a protein having at least about 85% amino acid sequence identity to NCBI Accession No. NP_001333385.1 or fragment thereof, having immunomodulatory activity. An exemplary amino acid sequence is provided below.

>NP_001333385.1 T-cell surface glycoprotein CD5
isoform 2 [Homo sapiens]
(SEQ ID NO: 426)
MVCSQSWGRSSKQWEDPSQASKVCQRLNCGVPLSLGPFLVTYTPQSSIICYGQLGSFSNCSHSR
NDMCHSLGLTCLEPQKTTPPTTRPPPTTTPEPTAPPRLQLVAQSGGQHCAGVVEFYSGSLGGTI
SYEAQDKTQDLENFLCNNLQCGSFLKHLPETEAGRAQDPGEPREHQPLPIQWKIQNSSCTSLEH
CFRKIKPQKSGRVLALLCSGFQPKVQSRLVGGSSICEGTVEVRQGAQWAALCDSSSARSSLRWE
EVCREQQCGSVNSYRVLDAGDPTSRGLFCPHQKLSQCHELWERNSYCKKVFVTCQDPNPAGLAA
GTVASIILALVLLVVLLVVCGPLAYKKLVKKFRQKKQRQWIGPTGMNQNMSFHRNHTATVRSHA
ENPTASHVDNEYSQPPRNSHLSAYPALEGALHRSSMQPDNSSDSDYDLHGAQRL.

[0158] By “cluster of differentiation 5 (CD5) polynucleotide” is meant a polynucleotide encoding a CD5 polypeptide, as well as the introns, exons, 3′ untranslated regions, 5′ untranslated regions, and regulatory sequences associated with its expression, or fragments thereof. In embodiments, a CD5 polynucleotide is the genomic sequence, cDNA, RNA, or gene associated with and/or required for CD5 expression. An exemplary CD5 nucleic acid sequence is provided below. >NM_001346456.1 Homo sapiens CD5 molecule (CD5), transcript variant 2, mRNA

(SEQ ID NO: 427)
GAGTCTTGCTGATGCTCCCGGCTGAATAAACCCCTTCCTTCTTTAACTTGGTGTCTGAGGGGTT
TTGTCTGTGGCTTGTCCTGCTACATTTCTTGGTTCCCTGACCAGGAAGCAAAGTGATTAACGGA
CAGTTGAGGCAGCCCCTTAGGCAGCTTAGGCCTGCCTTGTGGAGCATCCCCGCGGGGAACTCTG
GCCAGCTTGAGCGACACGGATCCTCAGAGCGCTCCCAGGTAGGCAATTGCCCCAGTGGAATGCC
TCGTCAGAGCAGTGCATGGCAGGCCCCTGTGGAGGATCAACGCAGTGGCTGAACACAGGGAAGG
AACTGGCACTTGGAGTCCGGACAACTGAAACTTGTCGCTTCCTGCCTCGGACGGCTCAGCTGGT
ATGACCCAGATTTCCAGGCAAGGCTCACCCGTTCCAACTCGAAGTGCCAGGGCCAGCTGGAGGT
CTACCTCAAGGACGGATGGCACATGGTTTGCAGCCAGAGCTGGGGCCGGAGCTCCAAGCAGTGG
GAGGACCCCAGTCAAGCGTCAAAAGTCTGCCAGCGGCTGAACTGTGGGGTGCCCTTAAGCCTTG
GCCCCTTCCTTGTCACCTACACACCTCAGAGCTCAATCATCTGCTACGGACAACTGGGCTCCTT
CTCCAACTGCAGCCACAGCAGAAATGACATGTGTCACTCTCTGGGCCTGACCTGCTTAGAACCC
CAGAAGACAACACCTCCAACGACAAGGCCCCCGCCCACCACAACTCCAGAGCCCACAGCTCCTC
CCAGGCTGCAGCTGGTGGCACAGTCTGGCGGCCAGCACTGTGCCGGCGTGGTGGAGTTCTACAG
CGGCAGCCTGGGGGGTACCATCAGCTATGAGGCCCAGGACAAGACCCAGGACCTGGAGAACTTC
CTCTGCAACAACCTCCAGTGTGGCTCCTTCTTGAAGCATCTGCCAGAGACTGAGGCAGGCAGAG
CCCAAGACCCAGGGGAGCCACGGGAACACCAGCCCTTGCCAATCCAATGGAAGATCCAGAACTC
AAGCTGTACCTCCCTGGAGCATTGCTTCAGGAAAATCAAGCCCCAGAAAAGTGGCCGAGTTCTT
GCCCTCCTTTGCTCAGGTTTCCAGCCCAAGGTGCAGAGCCGTCTGGTGGGGGGCAGCAGCATCT
GTGAAGGCACCGTGGAGGTGCGCCAGGGGGCTCAGTGGGCAGCCCTGTGTGACAGCTCTTCAGC
CAGGAGCTCGCTGCGGTGGGAGGAGGTGTGCCGGGAGCAGCAGTGTGGCAGCGTCAACTCCTAT
CGAGTGCTGGACGCTGGTGACCCAACATCCCGGGGGCTCTTCTGTCCCCATCAGAAGCTGTCCC
AGTGCCACGAACTTTGGGAGAGAAATTCCTACTGCAAGAAGGTGTTTGTCACATGCCAGGATCC
AAACCCCGCAGGCCTGGCCGCAGGCACGGTGGCAAGCATCATCCTGGCCCTGGTGCTCCTGGTG
GTGCTGCTGGTCGTGTGCGGCCCCCTTGCCTACAAGAAGCTAGTGAAGAAATTCCGCCAGAAGA
AGCAGCGCCAGTGGATTGGCCCAACGGGAATGAACCAAAACATGTCTTTCCATCGCAACCACAC
GGCAACCGTCCGATCCCATGCTGAGAACCCCACAGCCTCCCACGTGGATAACGAATACAGCCAA
CCTCCCAGGAACTCCCACCTGTCAGCTTATCCAGCTCTGGAAGGGGCTCTGCATCGCTCCTCCA
TGCAGCCTGACAACTCCTCCGACAGTGACTATGATCTGCATGGGGCTCAGAGGCTGTAAAGAAC
TGGGATCCATGAGCAAAAAGCCGAGAGCCAGACCTGTTTGTCCTGAGAAAACTGTCCGCTCTTC
ACTTGAAATCATGTCCCTATTTCTACCCCGGCCAGAACATGGACAGAGGCCAGAAGCCTTCCGG
ACAGGCGCTGCTGCCCCGAGTGGCAGGCCAGCTCACACTCTGCTGCACAACAGCTCGGCCGCCC
CTCCACTTGTGGAAGCTGTGGTGGGCAGAGCCCCAAAACAAGCAGCCTTCCAACTAGAGACTCG
GGGGTGTCTGAAGGGGGCCCCCTTTCCCTGCCCGCTGGGGAGCGGCGTCTCAGTGAAATCGGCT
TTCTCCTCAGACTCTGTCCCTGGTAAGGAGTGACAAGGAAGCTCACAGCTGGGCGAGTGCATTT
TGAATAGTTTTTTGTAAGTAGTGCTTTTCCTCCTTCCTGACAAATCGAGCGCTTTGGCCTCTTC
TGTGCAGCATCCACCCCTGCGGATCCCTCTGGGGAGGACAGGAAGGGGACTCCCGGAGACCTCT
GCAGCCGTGGTGGTCAGAGGCTGCTCACCTGAGCACAAAGACAGCTCTGCACATTCACCGCAGC
TGCCAGCCAGGGGTCTGGGTGGGCACCACCCTGACCCACAGCGTCACCCCACTCCCTCTGTCTT
ATGACTCCCCTCCCCAACCCCCTCATCTAAAGACACCTTCCTTTCCACTGGCTGTCAAGCCCAC
AGGGCACCAGTGCCACCCAGGGCCCGGCACAAAGGGGCGCCTAGTAAACCTTAACCAACTTGGT
TTTTTGCTTCACCCAGCAATTAAAAGTCCCAAGCTGAGGTAGTTTCAGTCCATCACAGTTCATC
TTCTAACCCAAGAGTCAGAGATGGGGCTGGTCATGTTCCTTTGGTTTGAATAACTCCCTTGACG
AAAACAGACTCCTCTAGTACTTGGAGATCTTGGACGTACACCTAATCCCATGGGGCCTCGGCTT
CCTTAACTGCAAGTGAGAAGAGGAGGTCTACCCAGGAGCCTCGGGTCTGATCAAGGGAGAGGCC
AGGCGCAGCTCACTGCGGCGGCTCCCTAAGAAGGTGAAGCAACATGGGAACACATCCTAAGACA
GGTCCTTTCTCCACGCCATTTGATGCTGTATCTCCTGGGAGCACAGGCATCAATGGTCCAAGCC
GCATAATAAGTCTGGAAGAGCAAAAGGGAGTTACTAGGATATGGGGTGGGCTGCTCCCAGAATC
TGCTCAGCTTTCTGCCCCCACCAACACCCTCCAACCAGGCCTTGCCTTCTGAGAGCCCCCGTGG
CCAAGCCCAGGTCACAGATCTTCCCCCGACCATGCTGGGAATCCAGAAACAGGGACCCCATTTG
TCTTCCCATATCTGGTGGAGGTGAGGGGGCTCCTCAAAAGGGAACTGAGAGGCTGCTCTTAGGG
AGGGCAAAGGTTCGGGGGCAGCCAGTGTCTCCCATCAGTGCCTTTTTTAATAAAAGCTCTTTCA
TCTATAGTTTGGCCACCATACAGTGGCCTCAAAGCAACCATGGCCTACTTAAAAACCAAACCAA
AAATAAAGAGTTTAGTTGAGGAGAAAAAAAAAAAAAAAAAAAAAAAAA.

An exemplary CD5 gene sequence is provided at ENSEMBL Accession No. ENSG00000110448.

[0159] The term “conservative amino acid substitution” or “conservative mutation” refers to the replacement of one amino acid by another amino acid with a common property. A functional way to define common properties between individual amino acids is to analyze the normalized frequencies of amino acid changes between corresponding proteins of homologous organisms (Schulz, G. E. and Schirmer, R. H., Principles of Protein Structure, Springer-Verlag, New York (1979)). According to such analyses, groups of amino acids can be defined where amino acids within a group exchange preferentially with each other, and therefore resemble each other most in their impact on the overall protein structure (Schulz, G. E. and Schirmer, R. H., supra). Non-limiting examples of conservative mutations include amino acid substitutions of amino acids, for example, lysine for arginine and vice versa such that a positive charge can be maintained; glutamic acid for aspartic acid and vice versa such that a negative charge can be maintained; serine for threonine such that a free —OH can be maintained; and glutamine for asparagine such that a free —NH₂ can be maintained.

[0160] Amino acids generally can be grouped into classes according to the following common side-chain properties:
[0161] (1) hydrophobic: Norleucine, Met, Ala, Val, Leu, He;
[0162] (2) neutral hydrophilic: Cys, Ser, Thr, Asn, Gin;
[0163] (3) acidic: Asp, Glu;
[0164] (4) basic: His, Lys, Arg;
[0165] (5) residues that influence chain orientation: Gly, Pro;
[0166] (6) aromatic: Trp, Tyr, Phe.

[0167] In some embodiments, conservative substitutions can involve the exchange of a member of one of these classes for another member of the same class. In some embodiments, non-conservative amino acid substitutions can involve exchanging a member of one of these classes for another class.

[0168] The term “coding sequence” or “protein coding sequence” as used interchangeably herein refers to a segment of a polynucleotide that codes for a protein. Coding sequences can also be referred to as open reading frames. The region or sequence is bounded nearer the 5′ end by a start codon and nearer the 3′ end with a stop codon. Stop codons useful with the base editors described herein include the following: TAG, TAA, and TGA.

[0169] By “complex” is meant a combination of two or more molecules whose interaction relies on inter-molecular forces. Non-limiting examples of inter-molecular forces include covalent and non-covalent interactions. Non-limiting examples of non-covalent interactions include hydrogen bonding, ionic bonding, halogen bonding, hydrophobic bonding, van der Waals interactions (e.g., dipole-dipole interactions, dipole-induced dipole interactions, and London dispersion forces), and x-effects. In an embodiment, a complex comprises polypeptides, polynucleotides, or a combination of one or more polypeptides and one or more polynucleotides. In one embodiment, a complex comprises one or more polypeptides that associate to form a base editor (e.g., base editor comprising a nucleic acid programmable DNA binding protein, such as Cas9, and a deaminase) and a polynucleotide (e.g., a guide RNA). In an embodiment, the complex is held together by hydrogen bonds. It should be appreciated that one or more components of a base editor (e.g., a deaminase, or a nucleic acid programmable DNA binding protein) may associate covalently or non-covalently. As one example, a base editor may include a deaminase covalently linked to a nucleic acid programmable DNA binding protein (e.g., by a peptide bond). Alternatively, a base editor may include a deaminase and a nucleic acid programmable DNA binding protein that associate noncovalently (e.g., where one or more components of the base editor are supplied in trans and associate directly or via another molecule such as a protein or nucleic acid). In an embodiment, one or more components of the complex are held together by hydrogen bonds.

[0170] By “cytosine” or “4-Aminopyrimidin-2(1H)-one” is meant a purine nucleobase with the molecular formula C₄H₅N₃O, having the structure

[chemical structure]

and corresponding to CAS No. 71-30-7.

[0171] By “cytidine” is meant a cytosine molecule attached to a ribose sugar via a glycosidic bond, having the structure

[chemical structure]

and corresponding to CAS No. 65-46-3. Its molecular formula is C₉H₁₃N₃O₅.

[0172] By “Cytidine Base Editor (CBE)” is meant a base editor comprising a cytidine deaminase.

[0173] By “Cytidine Base Editor (CBE) polynucleotide” is meant a polynucleotide encoding a CBE.

[0174] By “cytidine deaminase” or “cytosine deaminase” is meant a polypeptide or fragment thereof capable of deaminating cytidine or cytosine. In embodiments, the cytidine or cytosine is present in a polynucleotide. In one embodiment, the cytidine deaminase converts cytosine to uracil or 5-methylcytosine to thymine. The terms “cytidine deaminase” and “cytosine deaminase” are used interchangeably throughout the application. Petromyzon marinus cytosine deaminase 1 (PmCDA1) (SEQ ID NO: 13-14), Activation-induced cytidine deaminase (AICDA) (SEQ ID NOs: 15-21), and APOBEC (SEQ ID NOs: 12-61) are exemplary cytidine deaminases. Further exemplary cytidine deaminase (CDA) sequences are provided in the Sequence Listing as SEQ ID NOs: 62-66 and SEQ ID NOs: 67-189. Non-limiting examples of cytidine deaminases include those described in PCT/US20/16288, PCT/US2018/021878, 180802-021804/PCT, PCT/US2018/048969, and PCT/US2016/058344.

[0175] By “cytosine deaminase activity” is meant catalyzing the deamination of cytosine or cytidine. In one embodiment, a polypeptide having cytosine deaminase activity converts an amino group to a carbonyl group. In an embodiment, a cytosine deaminase converts cytosine to uracil (i.e., C to U) or 5-methylcytosine to thymine (i.e., 5mC to T). In some embodiments, a cytosine deaminase as provided herein has increased cytosine deaminase activity (e.g., at least 10-fold, 20-fold, 30-fold, 40-fold, 50-fold, 60-fold, 70-fold, 80-fold, 90-fold, 100-fold or more) relative to a reference cytosine deaminase.

[0176] The term “deaminase” or “deaminase domain,” as used herein, refers to a protein or fragment thereof that catalyzes a deamination reaction.

[0177] The term “detect” refers to identifying the presence, absence or amount of the analyte to be detected. In one embodiment, a sequence alteration in a polynucleotide or polypeptide is detected. In another embodiment, the presence of indels is detected.

[0178] By “detectable label” is meant a composition that when linked to a molecule of interest renders the latter detectable, via spectroscopic, photochemical, biochemical, immunochemical, or chemical means. For example, useful labels include radioactive isotopes, magnetic beads, metallic beads, colloidal particles, fluorescent dyes, electron-dense reagents, enzymes (for example, as commonly used in an enzyme linked immunosorbent assay (ELISA)), biotin, digoxigenin, or haptens.

[0179] By “disease” is meant any condition or disorder that damages or interferes with the normal function of a cell, tissue, or organ. In some embodiments, the disease is a cancer (e.g., a hematological cancer or a solid tumor). In some instances, the disease is a disease that can be treated using the modified allogeneic T cells of the disclosure. In one embodiment, the disease is a neoplasia or cancer. In some instances, the disease is a malignancy. In some cases, the disease is a dysplasia, or a non-malignant or benign neoplasia. In some embodiments, the disease is a hematological cancer. By “hematological cancer” is meant a malignancy of immune system cells. In some embodiments, the hematological cancer is leukemia, myeloma, and/or lymphoma. Lymphomas and Leukemias are examples of “liquid cancers” or cancers present in the blood and are derived from the transformation of either a hematopoietic precursor in the bone marrow or a mature hematopoietic cell in the blood. Leukemias can be lymphoid or myeloid, and acute or chronic. In the case of myelomas, the transformed cell is a fully differentiated plasma cell that may be present as a dispersed collection of malignant cells or as a solid mass in the bone marrow. In the case of lymphomas, a transformed lymphocyte in a secondary lymphoid tissue generates a solid mass. Lymphomas are classified either Hodgkin lymphoma (HL) or non-Hodgkin lymphoma (NHL). In some cases, the disease or disorder is an autoimmune disorder, such as arthritis (e.g., rheumatoid arthritis) or systemic lupus erythematosus (SLE). In some embodiments, the disease is a B-cell lymphoma or a T-cell lymphoma (e.g., T-cell acute lymphoblastic leukemia (T-ALL)).

[0180] By “dual editing activity” or “dual deaminase activity” is meant having adenosine deaminase and cytidine deaminase activity. In one embodiment, a base editor having dual editing activity has both A→G and C→T activity, wherein the two activities are approximately equal or are within about 10% or 20% of each other. In another embodiment, a dual editor has A→G activity that no more than about 10% or 20% greater than C→T activity. In another embodiment, a dual editor has A→G activity that is no more than about 10% or 20% less than C→T activity. In some embodiments, the adenosine deaminase variant has predominantly cytosine deaminase activity, and little, if any, adenosine deaminase activity. In some embodiments, the adenosine deaminase variant has cytosine deaminase activity, and no significant or no detectable adenosine deaminase activity. Non-limiting examples of proteins having dual deaminase activity include those described in International Patent Application Publications No. WO 2024/040083 and WO 2022/204574, the disclosures of which are hereby incorporated by reference in their entireties for all purposes.

[0181] By “effective amount” is meant the amount of an agent or active compound, that is required to ameliorate the symptoms of a disease relative to an untreated patient or an individual without disease, i.e., a healthy individual, or is the amount of the agent or active compound sufficient to elicit a desired biological response. The effective amount of active compound(s) used to practice embodiments of the present disclosure for therapeutic treatment of a disease varies depending upon the manner of administration, the age, body weight, and general health of the subject. Ultimately, the attending physician or veterinarian will decide the appropriate amount and dosage regimen. Such amount is referred to as an “effective” amount.

[0182] An “epitope tag” refers to a peptide or amino acid sequence (e.g., an epitope) that is fused, linked, or coupled to a protein, such as a recombinant protein produced by recombinant techniques, and that can be specifically bound by an antibody, e.g., an anti-tag monoclonal antibody or binding molecule that is directed to or generated against the tag peptide or amino acid sequence. In an embodiment, the protein to which an epitope tag is fused, linked, or coupled is an antibody or VHH protein, e.g., a recombinantly produced antibody or VHH protein. In an embodiment, the VHH is an anti-CD5 VHH antibody.

[0183] Other molecules may serve as protein, amino acid sequence, or polynucleotide tags that are fused, linked, or coupled to a protein, such as a recombinant protein produced by recombinant techniques, e.g., an anti-CD5 VHH antibody described herein. In an embodiment, the tag can be specifically bound by an antibody, e.g., an anti-tag monoclonal antibody or binding molecule that is directed to or generated against the tag peptide or amino acid sequence. Examples of tags include, without limitation, FLAG tags (peptide sequence DYKDDDDK (SEQ ID NO: 428) recognized by an anti-FLAG antibody), polyHistidine (His) tags (5-10 histidine residues (HHHHHH (SEQ ID NO: 429)) bound by a nickel or cobalt chelate), E-tag, a peptide comprising amino acid sequence GAPVPYPDPLEPR (SEQ ID NO: 430) recognized by an antibody; an immunoglobulin Fc region or portion thereof, e.g., having effector or modulator function (Fc tag).

[0184] By “fragment” is meant a portion of a polypeptide or nucleic acid molecule. This portion contains, at least about 10%, 20%, 30%, 40%, 50%, 60%, 70%, 80%, or 90% of the entire length of the reference nucleic acid molecule or polypeptide. A fragment may contain 10, 20, 30, 40, 50, 60, 70, 80, 90, or 100, 200, 300, 400, 500, 600, 700, 800, 900, or 1000 nucleotides or amino acids. In some embodiments, the fragment is a functional fragment.

[0185] A “framework (FR) region” or “FR region” includes amino acid residues that are adjacent to the CDRs in V_{H}, and V_{L} regions, and in VHHs. For example, FR region residues may be present in VHHs as described herein, camelid antibodies (VHHs), human antibodies, rodent-derived antibodies (e.g., murine and rat antibodies), humanized antibodies, primatized antibodies, chimeric antibodies, antibody fragments (e.g., Fab fragments), VHHs, single-chain antibody fragments (e.g., scFv fragments), antibody domains, and bispecific antibodies, among others.

[0186] By “guide polynucleotide” is meant a polynucleotide or polynucleotide complex which is specific for a target sequence and can form a complex with a polynucleotide programmable nucleotide binding domain protein (e.g., Cas9 or Cpf1). In an embodiment, the guide polynucleotide is a guide RNA (gRNA). gRNAs can exist as a complex of two or more RNAs, or as a single RNA molecule. A guide polynucleotide typically contains a “spacer,” which may be about 20 base pairs in length. Shorter or longer spacers may also be used in guide polynucleotides, e.g., 15-, 16-, 17-, 18-, 19-, 21-, 22-, 23-, 24-, or 25-nucleotides in length. In some embodiments, a target sequence is in a gene or on a chromosome, for example, and is complementary to a space. In some embodiments, a degree of complementarity or identity between a spacer sequence and its corresponding target sequence may be about or at least 75%, 80%, 85%, 90%, 95%, 96%, 97%, 98%, 99%, or 100%.

[0187] The term “humanized” antibodies refers to forms of non-human (e.g., murine) antibodies, camelid-derived single domain antibody (sdAb) binding molecules, which are comprised of the heavy chain variable (V_{H}) region of heavy-chain-only antibodies (Abs) or VHHs. Humanized antibodies include chimeric immunoglobulins, immunoglobulin chains or fragments thereof (such as Fv, Fab, Fab′, F(ab′)₂ or other target-binding subdomains of antibodies) which contain minimal sequences derived from non-human immunoglobulin. In general, a humanized antibody or VHH may comprise substantially all of at least one variable domain (or two variable domains in the case of non-VHH antibodies), in which all or substantially all of the CDR regions correspond to those of a non-human immunoglobulin. All or substantially all of the FR regions of a humanized antibody may also be derived from a human immunoglobulin sequence. In the case of non-VHH antibodies, a VHH or a humanized antibody can also comprise at least a portion of an immunoglobulin constant region (Fc), which may be that of a human immunoglobulin consensus sequence. Techniques and protocols for humanizing antibodies (as well as VHHs) are known and practiced in the art, as described, for examples, in Riechmann et al., Nature, 332:323-7, 1988; Kasmiri et al., Methods, 36(1): 25-34, 2005; U.S. Pat. Nos. 5,530,101; 5,585,089; 5,693,761; 5,693,762; and U.S. Pat. No. 6,180,370 to Queen et al; EP239400; WO 1991/09967; U.S. Pat. No. 5,225,539; EP592106; and EP519596, the contents of which are incorporated herein by reference. Humanized antibodies or VHHs are molecularly engineered to contain even more human-like immunoglobulin domains, and incorporate only the CDRs of the VHH or animal-derived monoclonal antibody by carefully examining the sequence of the hyper-variable loops of the V regions of the monoclonal antibody or VHH, and fitting them to the structure of the human antibody chains. This process is routinely and commonly carried out by one having skill in the art. See, e.g., U.S. Pat. No. 6,187,287, the contents of which are incorporated by reference herein.

[0188] “Graft versus host disease” (GVHD) refers to a pathological condition where transplanted cells of a donor generate an immune response against cells of the host.

[0189] By “heterologous,” or “exogenous” is meant a polynucleotide or polypeptide that 1) has been experimentally incorporated into a polynucleotide or polypeptide sequence to which the polynucleotide or polypeptide is not normally found in nature; and/or 2) has been experimentally placed into a cell that does not normally comprise the polynucleotide or polypeptide. In some embodiments, “heterologous” means that a polynucleotide or polypeptide has been experimentally placed into a non-native context. In some embodiments, a heterologous polynucleotide or polypeptide is derived from a first species or host organism and is incorporated into a polynucleotide or polypeptide derived from a second species or host organism. In some embodiments, the first species or host organism is different from the second species or host organism. In some embodiments the heterologous polynucleotide is DNA. In some embodiments the heterologous polynucleotide is RNA.

[0190] “Host versus graft disease” (HVGD) or “host-versus-graft rejection” refers to a pathological condition where the immune system of a host generates an immune response against transplanted cells of an allogeneic donor.

[0191] “Hybridization” means hydrogen bonding, which may be Watson-Crick, Hoogsteen or reversed Hoogsteen hydrogen bonding, between complementary nucleobases. For example, adenine and thymine are complementary nucleobases that pair through the formation of hydrogen bonds.

[0192] By “immune cell” is meant a cell of the immune system capable of generating an immune response. Exemplary immune cells include, but are not limited to, T cells, NK cells, B cells, macrophages, hematopoietic stem cells, or precursors thereof. In embodiments, an immune cell is allogeneic to a subject to whom the cell is to be administered. In embodiments, an immune cell is from a donor and is allogeneic to a subject to which the immune cell will be administered after being modified according to the methods provided herein. The disclosure features methods for preparing modified allogeneic immune cells with improved characteristics (e.g., increased persistence in a subject) as well as the cells produced by these methods.

[0193] By “immune effector cell” is meant a lymphocyte, once activated, capable of effecting an immune response upon a target cell. In some embodiments, immune effector cells are effector T cells. In some embodiments, the effector T cell is a naïve CD8⁺ T cell, a cytotoxic T cell, a natural killer T (NKT) cell, a natural killer (NK) cell, or a regulatory T (Treg) cell. In some embodiments, immune effector cells are effector NK cells. In some embodiments, the effector T cells are thymocytes, immature T lymphocytes, mature T lymphocytes, resting T lymphocytes, or activated T lymphocytes. In some embodiments the immune effector cell is a CD4⁺ CD8⁺ T cell or a CD4⁻ CD8⁻ T cell. In some embodiments the immune effector cell is a T helper cell. In some embodiments the T helper cell is a T helper 1 (Th1), a T helper 2 (Th2) cell, or a helper T cell expressing CD4 (CD4+ T cell).

[0194] By “immunomodulatory activity” is meant increasing, reducing, or sustaining an immune response.

[0195] By “increases” is meant a positive alteration of at least 10%, 25%, 50%, 75%, or 100%, or about 1.5 fold, about 2 fold, about 3-fold, about 4-fold, about 5-fold, about 6-fold, about 7-fold, about 8-fold, about 9-fold, about 10-fold, about 15-fold, about 20-fold, about 25-fold, about 30-fold, about 35-fold, about 40-fold, about 45-fold, about 50-fold, or about 100-fold.

[0196] The terms “inhibitor of base repair,” “base repair inhibitor,” “IBR” or their grammatical equivalents refer to a protein that is capable in inhibiting the activity of a nucleic acid repair enzyme, for example a base excision repair enzyme.

[0197] The terms “isolated,” “purified,” or “biologically pure” refer to material that is free to varying degrees from components which normally accompany it as found in its native state. “Isolate” denotes a degree of separation from original source or surroundings. “Purify” denotes a degree of separation that is higher than isolation. A “purified” or “biologically pure” protein is sufficiently free of other materials such that any impurities do not materially affect the biological properties of the protein or cause other adverse consequences. That is, a nucleic acid or peptide of this disclosure is purified if it is substantially free of cellular material, viral material, or culture medium when produced by recombinant DNA techniques, or chemical precursors or other chemicals when chemically synthesized. Purity and homogeneity are typically determined using analytical chemistry techniques, for example, polyacrylamide gel electrophoresis or high performance liquid chromatography. The term “purified” can denote that a nucleic acid or protein gives rise to essentially one band in an electrophoretic gel. For a protein that can be subjected to modifications, for example, phosphorylation or glycosylation, different modifications may give rise to different isolated proteins, which can be separately purified.

[0198] By “isolated polynucleotide” is meant a nucleic acid molecule that is free of the genes which, in the naturally-occurring genome of the organism from which the nucleic acid molecule of the disclosure is derived, flank the gene. The term therefore includes, for example, a recombinant DNA that is incorporated into a vector; into an autonomously replicating plasmid or virus; or into the genomic DNA of a prokaryote or eukaryote; or that exists as a separate molecule (for example, a cDNA or a genomic or cDNA fragment produced by PCR or restriction endonuclease digestion) independent of other sequences. In addition, the term includes an RNA molecule that is transcribed from a DNA molecule, as well as a recombinant DNA that is part of a hybrid gene encoding additional polypeptide sequence.

[0199] By an “isolated polypeptide” is meant a polypeptide of the disclosure that has been separated from components that naturally accompany it. Typically, the polypeptide is isolated when it is at least 60%, by weight, free from the proteins and naturally-occurring organic molecules with which it is naturally associated. In some embodiments, the preparation is at least 75%, at least 90%, or at least 99%, by weight, a polypeptide of the disclosure. An isolated polypeptide of the disclosure may be obtained, for example, by extraction from a natural source, by expression of a recombinant nucleic acid encoding such a polypeptide; or by chemically synthesizing the protein. Purity can be measured by any appropriate method, for example, column chromatography, polyacrylamide gel electrophoresis, or by HPLC analysis.

[0200] The term “kill switch” refers to a polypeptide capable of mediating the killing of a cell when the polypeptide is specifically bound by an agent. In some cases, the agent is a small molecule or monoclonal antibody. In some cases, the agent is Ritixumab. In various embodiments, the kill switch is selected from RQR1, RQR2, RQR8, RQR1G4S, RQR2G4S, RR, G4SRR, G4SRRG4S, G4SRRG4SCD8, G4SRRG4SCD28, G4SRRCD28, and QG4S. In various embodiments, the kill switch is fused to a chimeric antigen receptor. In some embodiments, a kill switch is expressed on the surface of a cell and is not fused to a chimeric antigen receptor.

[0201] The term “linker”, as used herein, refers to a molecule that links two moieties. In one embodiment, the term “linker” refers to a covalent linker (e.g., covalent bond) or a non-covalent linker.

[0202] By “marker” is meant any agent or clinical parameter having an alteration that is associated with a disease or disorder. In embodiments, the agent is a polypeptide or polynucleotide and the alteration is in expression, level, structure, or activity. In embodiments, the marker is associated with a disease or disorder. In some instances, the disease or disorder is a neoplasia, such as a hematologic cancer (e.g., T-cell acute lymphoblastic leukemia (T-ALL)). Non-limiting examples of markers include B2M, CD2, CD5, CD45, CIITA, HLA-DR, IFNg, PD1, and TCRαβ.

[0203] The term “mRNA” refers to a polynucleotide and comprises an open reading frame that can be translated into a polypeptide. An mRNA molecule may serve as a substrate for translation by a ribosome and amino-acylated tRNAs. An mRNA molecule may comprise a phosphate-sugar backbone including ribose residues or analogs thereof, e.g., 2′-methoxy ribose residues. In some embodiments, the sugars of an mRNA phosphate-sugar backbone contain or contain only ribose residues, 2′-methoxy ribose residues, or a combination thereof.

[0204] The term “mutation,” as used herein, refers to a substitution of a residue within a sequence, e.g., a nucleic acid or amino acid sequence, with another residue, or a deletion or insertion of one or more residues within a sequence. Mutations are typically described herein by identifying the original residue followed by the position of the residue within the sequence and by the identity of the newly substituted residue. Various methods for making the amino acid substitutions (mutations) provided herein are well known in the art, and are provided by, for example, Green and Sambrook, Molecular Cloning: A Laboratory Manual (4^{th} ed., Cold Spring Harbor Laboratory Press, Cold Spring Harbor, N.Y. (2012)).

[0205] “Neoplasia” refers to cells or tissues exhibiting abnormal growth or proliferation. The term neoplasia encompasses cancer, liquid, and solid tumors. In some embodiments, the neoplasia is a solid tumor. In other embodiments, the neoplasia is a liquid tumor. In some embodiments, the neoplasia is a hematological cancer. In some embodiments, the hematological cancer is leukemia, myeloma, and/or lymphoma. In some embodiments, the hematological cancer is a B cell cancer. In some embodiments, the B cell cancer is a lymphoma or a leukemia. In some cases, the leukemia comprises a pre-leukemia. In some cases, the leukemia is an acute leukemia. Acute leukemias include, for example, an acute myeloid leukemia (AML). Acute leukemias also include, for example, an acute lymphoid leukemia or an acute lymphocytic leukemia (ALL); ALL includes B-lineage ALL; T-lineage ALL; and T-cell acute lymphocytic leukemia (T-ALL).

[0206] By “helper lipid” is meant any neutral, zwitterionic, or anionic lipid.

[0207] The terms “nucleic acid” and “nucleic acid molecule,” as used herein, refer to a compound comprising a nucleobase and an acidic moiety, e.g., a nucleoside, a nucleotide, or a polymer of nucleotides. Typically, polymeric nucleic acids, e.g., nucleic acid molecules comprising three or more nucleotides are linear molecules, in which adjacent nucleotides are linked to each other via a phosphodiester linkage. In some embodiments, “nucleic acid” refers to individual nucleic acid residues (e.g., nucleotides and/or nucleosides). In some embodiments, “nucleic acid” refers to an oligonucleotide chain comprising three or more individual nucleotide residues. As used herein, the terms “oligonucleotide” and “polynucleotide” can be used interchangeably to refer to a polymer of nucleotides (e.g., a string of at least three nucleotides). In some embodiments, “nucleic acid” encompasses RNA as well as single and/or double-stranded DNA. Nucleic acids may be naturally occurring, for example, in the context of a genome, a transcript, an mRNA, tRNA, rRNA, siRNA, snRNA, a plasmid, cosmid, chromosome, chromatid, or other naturally occurring nucleic acid molecule. On the other hand, a nucleic acid molecule may be a non-naturally occurring molecule, e.g., a recombinant DNA or RNA, an artificial chromosome, an engineered genome, or fragment thereof, or a synthetic DNA, RNA, DNA/RNA hybrid, or including non-naturally occurring nucleotides or nucleosides. Furthermore, the terms “nucleic acid,” “DNA,” “RNA,” and/or similar terms include nucleic acid analogs, e.g., analogs having other than a phosphodiester backbone. Nucleic acids can be purified from natural sources, produced using recombinant expression systems and optionally purified, chemically synthesized, etc. Where appropriate, e.g., in the case of chemically synthesized molecules, nucleic acids comprise nucleoside analogs such as analogs having chemically modified bases or sugars, and backbone modifications. A nucleic acid sequence is presented in the 5′ to 3′ direction unless otherwise indicated. In some embodiments, a nucleic acid is or comprises natural nucleosides (e.g. adenosine, thymidine, guanosine, cytidine, uridine, deoxyadenosine, deoxythymidine, deoxyguanosine, and deoxycytidine); nucleoside analogs (e.g., 2-aminoadenosine, 2-thiothymidine, inosine, pyrrolo-pyrimidine, 3-methyl adenosine, 5-methylcytidine, 2-aminoadenosine, C5-bromouridine, C5-fluorouridine, C5-iodouridine, C5-propynyl-uridine, C5-propynyl-cytidine, C5-methylcytidine, 2-aminoadenosine, 7-deazaadenosine, 7-deazaguanosine, 8-oxoadenosine, 8-oxoguanosine, O(6)-methylguanine, and 2-thiocytidine); chemically modified bases; biologically modified bases (e.g., methylated bases); intercalated bases; modified sugars (2′—e.g., fluororibose, ribose, 2′-deoxyribose, arabinose, and hexose); and/or modified phosphate groups (e.g., phosphorothioates and 5′-N-phosphoramidite linkages).

[0208] The term “nuclear localization sequence,” “nuclear localization signal,” or “NLS” refers to an amino acid sequence that promotes import of a protein into the cell nucleus. Nuclear localization sequences are known in the art and described, for example, in Plank et al., International PCT application, PCT/EP2000/011690, filed Nov. 23, 2000, published as WO/2001/038547 on May 31, 2001, the contents of which are incorporated herein by reference for their disclosure of exemplary nuclear localization sequences. In other embodiments, the NLS is an optimized NLS described, for example, by Koblan et al., Nature Biotech. 2018 doi: 10.1038/nbt.4172. In some embodiments, an NLS comprises the amino acid sequence

```
  (SEQ ID NO: 190)
KRTADGSEFESPKKKRKV,
  (SEQ ID NO: 191)
KRPAATKKAGQAKKKK,
  (SEQ ID NO: 192)
KKTELQTTNAENKTKKL,
  (SEQ ID NO: 193)
KRGINDRNFWRGENGRKTR,
  (SEQ ID NO: 194)
RKSGKIAAIVVKRPRK,
  (SEQ ID NO: 195)
PKKKRKV,
  (SEQ ID NO: 196)
MDSLLMNRRKFLYQFKNVRWAKGRRETYLC,
  (SEQ ID NO: 328)
PKKKRKVEGADKRTADGSEFESPKKKRKV,
or
  (SEQ ID NO: 329)
RKSGKIAAIVVKRPRKPKKKRKV.
```

[0209] The term “nucleobase,” “nitrogenous base,” or “base,” used interchangeably herein, refers to a nitrogen-containing biological compound that forms a nucleoside, which in turn is a component of a nucleotide. The ability of nucleobases to form base pairs and to stack one upon another leads directly to long-chain helical structures such as ribonucleic acid (RNA) and deoxyribonucleic acid (DNA). Five nucleobases—adenine (A), cytosine (C), guanine (G), thymine (T), and uracil (U)—are called primary or canonical. Adenine and guanine are derived from purine, and cytosine, uracil, and thymine are derived from pyrimidine. DNA and RNA can also contain other (non-primary) bases that are modified. Non-limiting exemplary modified nucleobases can include hypoxanthine, xanthine, 7-methylguanine, 5,6-dihydrouracil, 5-methylcytosine (m5C), and 5-hydromethylcytosine. Hypoxanthine and xanthine can be created through mutagen presence, both of them through deamination (replacement of the amine group with a carbonyl group). Hypoxanthine can be modified from adenine. Xanthine can be modified from guanine. Uracil can result from deamination of cytosine. A “nucleoside” consists of a nucleobase and a five carbon sugar (either ribose or deoxyribose). Examples of a nucleoside include adenosine, guanosine, uridine, cytidine, 5-methyluridine (m5U), deoxyadenosine, deoxyguanosine, thymidine, deoxyuridine, and deoxycytidine. Examples of a nucleoside with a modified nucleobase includes inosine (I), xanthosine (X), 7-methylguanosine (m7G), dihydrouridine (D), 5-methylcytidine (m5C), and pseudouridine (I). A “nucleotide” consists of a nucleobase, a five carbon sugar (either ribose or deoxyribose), and at least one phosphate group. Non-limiting examples of modified nucleobases and/or chemical modifications that a modified nucleobase may include are the following: pseudo-uridine, 5-Methyl-cytosine, 2′-O-methyl-3′-phosphonoacetate, 2′-O-methyl thioPACE (MSP), 2′-O-methyl-PACE (MP), 2′-fluoro RNA (2′-F-RNA), constrained ethyl (S-cEt), 2′-O-methyl (‘M’), 2′-O-methyl-3′-phosphorothioate (‘MS’), 2′-O-methyl-3′-thiophosphonoacetate (‘MSP’), 5-methoxyuridine, phosphorothioate, and N1-Methylpseudouridine.

[0210] The term “nucleic acid programmable DNA binding protein” or “napDNAbp” may be used interchangeably with “polynucleotide programmable nucleotide binding domain” to refer to a protein that associates with a nucleic acid (e.g., DNA or RNA), such as a guide nucleic acid or guide polynucleotide (e.g., gRNA), that guides the napDNAbp to a specific nucleic acid sequence. In some embodiments, the polynucleotide programmable nucleotide binding domain is a polynucleotide programmable DNA binding domain. In some embodiments, the polynucleotide programmable nucleotide binding domain is a polynucleotide programmable RNA binding domain. In some embodiments, the polynucleotide programmable nucleotide binding domain is a Cas9 protein. A Cas9 protein can associate with a guide RNA that guides the Cas9 protein to a specific DNA sequence that is complementary to the guide RNA. In some embodiments, the napDNAbp is a Cas9 domain, for example a nuclease active Cas9, a Cas9 nickase (nCas9), or a nuclease inactive Cas9 (dCas9). Non-limiting examples of nucleic acid programmable DNA binding proteins include, Cas9 (e.g., dCas9 and nCas9), Cas12a/Cpfl, Cas12b/C2cl, Cas12c/C2c3, Cas12d/CasY, Cas12e/CasX, Cas12g, Cas12h, Cas12i, and Cas12j/CasΦ (Cas12j/Casphi). Non-limiting examples of Cas enzymes include Cas1, Cas1B, Cas2, Cas3, Cas4, Cas5, Cas5d, Cas5t, Cas5h, Cas5a, Cas6, Cas7, Cas8, Cas8a, Cas8b, Cas8c, Cas9 (also known as Csn1 or Csx12), Cas10, Cas10d, Cas12a/Cpfl, Cas12b/C2cl, Cas12c/C2c3, Cas12d/CasY, Cas12e/CasX, Cas12g, Cas12h, Cas12i, Cas12j/CasΦ, Cpf1, Csy1, Csy2, Csy3, Csy4, Cse1, Cse2, Cse3, Cse4, Cse5e, Csc1, Csc2, Csa5, Csn1, Csn2, Csm1, Csm2, Csm3, Csm4, Csm5, Csm6, Cmr1, Cmr3, Cmr4, Cmr5, Cmr6, Csb1, Csb2, Csb3, Csx17, Csx14, Csx10, Csx16, CsaX, Csx3, Csx1, Csx1S, Csx11, Csf1, Csf2, CsO, Csf4, Csd1, Csd2, Cst1, Cst2, Csh1, Csh2, Csa1, Csa2, Csa3, Csa4, Csa5, Type II Cas effector proteins, Type V Cas effector proteins, Type VI Cas effector proteins, CARF, DinG, homologues thereof, or modified or engineered versions thereof. Other nucleic acid programmable DNA binding proteins are also within the scope of this disclosure, although they may not be specifically listed in this disclosure. See, e.g., Makarova et al. “Classification and Nomenclature of CRISPR-Cas Systems: Where from Here?” CRISPR J. 2018 October; 1:325-336. doi: 10.1089/crispr.2018.0033; Yan et al., “Functionally diverse type V CRISPR-Cas systems” Science. 2019 Jan. 4; 363(6422): 88-91. doi: 10.1126/science.aav7271, the entire contents of each are hereby incorporated by reference. Exemplary nucleic acid programmable DNA binding proteins and nucleic acid sequences encoding nucleic acid programmable DNA binding proteins are provided in the Sequence Listing as SEQ ID NOs: 197-231, 232-245, 254-257, 260, and 378. In some embodiments, the napDNAbp is a (CRISPR-associated system) Cas9 endonuclease, for example, Cas9 (Csnl) from Streptococcus pyogenes (e.g., SEQ ID NO: 197), Cas9 from Neisseria meningitidis (NmeCas9; SEQ ID NO: 208), Nme2Cas9 (SEQ ID NO: 209), Streptococcus constellatus (ScoCas9), or derivatives thereof (e.g., a sequence with at least about 85% sequence identity to a Cas9, such as Nme2Cas9 or spCas9). Further non-limiting examples of nucleic acid programmable DNA binding proteins include those disclosed or referenced in Rufflow, et al., “Design of highly functional genome editors by modeling of the universe of CRISPR-Cas Sequences,” bioRxiv, posted Apr. 22, 2024, doi: 10.1101/2024.04.22.590591, the disclosure of which is incorporated herein by reference in its entirety for all purposes, which were designed using artificial intelligence. In some embodiments, the napDNAbp is OpenCRISPR-1, or a variant thereof (e.g., a variant comprising a D10A amino acid alteration and/or lacking an N-terminal methionine). Further non-limiting examples of nucleic acid programmable DNA binding proteins include those disclosed in International Patent Application No. PCT/US2019/047996.

[0211] The terms “nucleobase editing domain” or “nucleobase editing protein,” as used herein, refers to a protein or enzyme that can catalyze a nucleobase modification in RNA or DNA, such as cytosine (or cytidine) to uracil (or uridine) or thymine (or thymidine), and adenine (or adenosine) to hypoxanthine (or inosine) deaminations, as well as non-templated nucleotide additions and insertions. In some embodiments, the nucleobase editing domain is a deaminase domain (e.g., an adenine deaminase or an adenosine deaminase; or a cytidine deaminase or a cytosine deaminase).

[0212] As used herein, “obtaining” as in “obtaining an agent” includes synthesizing, purchasing, or otherwise acquiring the agent.

[0213] By “operably linked” is meant the connection between regulatory elements and one or more polynucleotides (genes) or a coding region. That is, gene expression is typically placed under the control of certain regulatory elements, including constitutive or inducible promoters, tissue-specific regulatory elements, and enhancers. A polynucleotide (gene or genes) or coding region is said to be “operably linked to” or “operatively linked to” or “operably associated with” the regulatory elements, meaning that the polynucleotide (gene or genes) or coding region is controlled or influenced by the regulatory elements. The one or more polynucleotides may be separated by spacers or linkers.

[0214] The term “PEG lipid” or “PEG-modified lipid” refers to polyethylene glycol (PEG)-modified lipids.

[0215] By “OpenCRISPR-1 polypeptide” is meant a protein with an amino acid sequence having at least about 85% amino acid sequence identity to SEQ ID NO: 647, or a fragment thereof that associates with a nucleic acid, such as a guide nucleic acid or guide polynucleotide, that guides the napDNAbp to a specific nucleic acid sequence. Further details relating to the OpenCRISPR-1 polypeptide are disclosed in Rufflow, et al., “Design of highly functional genome editors by modeling of the universe of CRISPR-Cas Sequences,” bioRxiv, posted Apr. 22, 2024, doi: 10.1101/2024.04.22.590591, the disclosure of which is incorporated herein by reference in its entirety for all purposes.

[0216] By “OpenCRISPR-1 polynucleotide” is meant a nucleic acid molecule encoding an OpenCRISPR-1 polypeptide, as well as the introns, exons, 3′ untranslated regions, 5′ untranslated regions, and regulatory sequences associated with its expression, or fragments thereof. In embodiments, an OpenCRISPR-1 polynucleotide is the genomic sequence, cDNA, mRNA, or gene associated with and/or required for OpenCRISPR-1 expression. An exemplary OpenCRISPR-1 nucleotide sequence is provided at SEQ ID NO: 648.

[0217] In various embodiments, a guide RNA suitable for use in combination with an OpenCRISPR-1 polypeptide contains a scaffold having at least 85% sequence identity to a nucleotide sequence selected from the following, or fragments thereof capable of binding to an OpenCRISPR-1 polypeptide:

```
  (SEQ ID NO: 649)
GUUUUAGAGCUGUGUUGAAAAACACAGCAAGUUAAAAUAAGGCUUUGUCC
GUAUCCAACUUGAAAAAGUGAGCACCGAUUCGGUGC;
  (SEQ ID NO: 650)
GUUUUAGAGCUGGAAACAGCAAGUUAAAAUAAGGCUUUGUCCGUAUCCAA
CUUGAAAAAGUGAGCACCGAUUCGGUGC;
and
(SEQ ID NO: 651)
GUUUUAGAGCUAGAAAUAGCAAGUUAAAAUAAGGCUAGUCCGUUAUCAAC
UUGAAAAAGUGGCACCGAGUCGGUGC.
```

[0218] By “subject” or “patient” is meant a mammal, including, but not limited to, a human or non-human mammal. In embodiments, the mammal is a bovine, equine, canine, ovine, rabbit, rodent, nonhuman primate, or feline. In an embodiment, “patient” refers to a mammalian subject with a higher than average likelihood of developing a disease or a disorder. Exemplary patients can be humans, non-human primates, cats, dogs, pigs, cattle, cats, horses, camels, llamas, goats, sheep, rodents (e.g., mice, rabbits, rats, or guinea pigs) and other mammalians that can benefit from the therapies disclosed herein. Exemplary human patients can be male and/or female.

[0219] “Patient in need thereof” or “subject in need thereof” is referred to herein as a patient diagnosed with, at risk or having, predetermined to have, or suspected of having a disease or disorder.

[0220] By “persistence” in the context of an allogeneic transplant is meant the continued survival of a donor cell in a host organism. In some embodiments, allogeneic cell(s) comprising one or more of the edits described herein (e.g., a base edit in a CD5, CD3e, CD3g, B2M, and/or CIITA gene, or regulatory element(s) thereof; or knockdown of a CD5, TCRαβ, B2M, and/or CIITA polypeptide) persist in a subject allogeneic to the cells at higher levels over time post-infusion than corresponding unedited allogeneic control cells. In embodiments, the percentage of edited cells (e.g., T cells, NK cells, or lymphocytes) persisting in a subject at a given time point (e.g., 7 days, 14 days, 1 month, 3 months, 6 months, 9 months, or greater than 1, 2, or 3 years is at least about 10%, 15%, 20%, 25%, 30%, 35%, 40%, 45%, 50%, 60%, 70%, 80%, 90%, 95%, 99%, or 100% greater than the level of unedited control cells at the same time point. A cell(s) modified by methods of the present disclosure are more persistent than a reference unmodified cell(s).

[0221] The terms “protein”, “peptide”, “polypeptide”, and their grammatical equivalents are used interchangeably herein, and refer to a polymer of amino acid residues linked together by peptide (amide) bonds. A protein, peptide, or polypeptide can be naturally occurring, recombinant, or synthetic, or any combination thereof.

[0222] The term “fusion protein” as used herein refers to a hybrid polypeptide which comprises protein domains from at least two different proteins.

[0223] The term “recombinant” as used herein in the context of proteins or nucleic acids refers to proteins or nucleic acids that do not occur in nature but are the product of human engineering. For example, in some embodiments, a recombinant protein or nucleic acid molecule comprises an amino acid or nucleotide sequence that comprises at least one, at least two, at least three, at least four, at least five, at least six, or at least seven mutations as compared to any naturally occurring sequence.

[0224] By “reduces” is meant a negative alteration of at least 10%, 25%, 50%, 75%, or 100%.

[0225] By “reference” is meant a standard or control condition. In one embodiment, the reference is a wild-type or healthy cell. In other embodiments and without limitation, a reference is an untreated cell or subject that is not subjected to a test condition, or is subjected to placebo or normal saline, medium, buffer, and/or a control vector that does not harbor a polynucleotide of interest. In some cases, the reference is an unedited or wild type cell (e.g., a T cell). In some cases, a reference is a healthy subject, such as a subject not having a neoplasia. In some embodiments, the reference is a subject not treated according to a method provided herein or not administered a composition provided herein (e.g., a composition comprising a CD5-binding polypeptide of the disclosure). The reference can be a cell that does not express one or more of the polypeptides described herein. The reference can be a subject before administration of a composition provided herein or treated according to a method provided herein and/or the subject before a change in a treatment (e.g., an alteration in dose or agent administered to the subject).

[0226] The term “RNA-programmable nuclease,” and “RNA-guided nuclease” refer to a nuclease that forms a complex with (e.g., binds or associates with) one or more RNA(s) that is not a target for cleavage. In some embodiments, an RNA-programmable nuclease, when in a complex with an RNA, may be referred to as a nuclease-RNA complex. Typically, the bound RNA(s) is referred to as a guide RNA (gRNA). In some embodiments, the RNA-programmable nuclease is the (CRISPR-associated system) Cas9 endonuclease, for example, Cas9 (Csnl) from Streptococcus pyogenes (e.g., SEQ ID NO: 197), Cas9 from Neisseria meningitidis (NmeCas9; SEQ ID NO: 208), Nme2Cas9 (SEQ ID NO: 209), Streptococcus constellatus (ScoCas9), or derivatives thereof (e.g., a sequence with at least about 85% sequence identity to a Cas9, such as Nme2Cas9 or spCas9).

[0227] By “specifically binds” is meant recognizes and binds a polypeptide of the disclosure, but which does not substantially recognize and bind other molecules in a sample. In embodiments, a capture molecule is a VHH domain or a fragment thereof. A VHH domain or fragment thereof that specifically binds to an antigen will bind to the antigen with a K_{D} of less than 100 nM. For example, a VHH domain or fragment thereof that specifically binds to an antigen will bind to the antigen with a K_{D} of up to 100 nM (e.g., between 1 uM and 100 nM). A VHH domain or fragment thereof that does not exhibit specific binding to a particular antigen or epitope thereof will exhibit a K_{D} of greater than 100 nM (e.g., greater than 500 nm, 1 uM, 100 uM, 500 uM, or 1 mM) for that particular antigen or epitope thereof. A variety of immunoassay formats may be used to select a VHH domain or fragment thereof that specifically immunoreactive with a particular protein or carbohydrate. For example, solid-phase ELISA immunoassays are routinely used to select VHH domains or fragments thereof specifically immunoreactive with a protein or carbohydrate. See, Harlow & Lane, Antibodies, A Laboratory Manual, Cold Spring Harbor Press, New York (1988) and Harlow & Lane, Using Antibodies, A Laboratory Manual, Cold Spring Harbor Press, New York (1999), for a description of immunoassay formats and conditions that can be used to determine specific immunoreactivity.

[0228] By “substantially identical” is meant a polypeptide or nucleic acid molecule exhibiting at least 50% identity to a reference amino acid sequence. In one embodiment, a reference sequence is a wild-type amino acid or nucleic acid sequence. In another embodiment, a reference sequence is any one of the amino acid or nucleic acid sequences described herein. In one embodiment, such a sequence is at least about 60%, 80%, 85%, 90%, 95%, 96%, 97%, 98%, 99%, 99.9%, or even 99.99% identical at the amino acid level or nucleic acid level to the sequence used for comparison.

[0229] Nucleic acid molecules useful in the methods of the disclosure include any nucleic acid molecule that encodes a polypeptide of the disclosure or a functional fragment thereof. Such nucleic acid molecules need not be 100% identical with an endogenous nucleic acid sequence but will typically exhibit substantial identity. Polynucleotides having “substantial identity” to an endogenous sequence are typically capable of hybridizing with at least one strand of a double-stranded nucleic acid molecule. Nucleic acid molecules useful in the methods of the disclosure include any nucleic acid molecule that encodes a polypeptide of the disclosure or a functional fragment thereof. Such nucleic acid molecules need not be 100% identical with an endogenous nucleic acid sequence but will typically exhibit substantial identity. Polynucleotides having “substantial identity” to an endogenous sequence are typically capable of hybridizing with at least one strand of a double-stranded nucleic acid molecule. By “hybridize” is meant pair to form a double-stranded molecule between complementary polynucleotide sequences (e.g., a gene described herein), or portions thereof, under various conditions of stringency. (See, e.g., Wahl, G. M. and S. L. Berger (1987) Methods Enzymol. 152:399; Kimmel, A. R. (1987) Methods Enzymol. 152:507).

[0230] By “specifically binds” or “selectively binds” is meant a polypeptide (e.g., antibody) that recognizes and binds a molecule (e.g., polypeptide, antigen, ligand), but that does not substantially recognize or bind to other molecules in a sample, for example, a biological sample. For example, two molecules (e.g., an antibody and its ligand) that specifically bind to each other form a complex that is relatively stable under physiologic conditions. Specific binding is characterized by a high affinity and a low to moderate capacity, as distinguished from nonspecific binding which usually has a low affinity with a moderate to high capacity.

[0231] The term “targeting molecules” refers to molecules that bind to target cells of interest. In some embodiments, a targeting molecule is an anti-CD5 VHH antibody of the disclosure, or a CD5-binding fragment thereof. In some embodiments, a targeting molecule is an antibody or antigen-binding fragment thereof. In some embodiments, the targeting molecule is a ligand, receptor and/or antibody/antibody fragment. In some cases, a targeting molecule bind specifically to a target cell. A targeting molecule is considered to bind to a target cell if it binds to a cell surface marker (e.g., antigen, ligand, receptor) of the target cell. In some embodiments, targeting molecules bind specifically to particular target cells—that is, they bind to cell surface markers that are present only on the particular target cells. Thus, a targeting molecule is considered to bind specifically to a T cell if it binds a cell surface marker that is expressed only on T cells. In some embodiments, a targeting molecule is an anti-CD5 VHH antibody of the disclosure, or a CD5-binding fragment thereof.

[0232] The term “Targeting particles” or “targeted particles” refers to particles that comprise on their surface targeting molecules that bind to cell surface markers on target cells of interest. In some embodiments, the target cells are lymphocytes (e.g., T cells). A targeting particle is considered to comprise a targeting molecule on its surface if the targeting molecule is associated with or interacts with (e.g., is covalently or non-covalently conjugated to/bound to) the surface of the targeting particle.

[0233] The term “target site” refers to a nucleotide sequence or nucleobase of interest within a nucleic acid molecule that is modified. In embodiments, the modification is deamination of a base. The deaminase can be a cytidine or an adenine deaminase. The fusion protein or base editing complex comprising a deaminase may comprise a dCas9-adenosine deaminase fusion protein, a Cas12b-adenosine deaminase fusion, or a base editor disclosed herein.

[0234] As used herein, the terms “treat,” treating,” “treatment,” and the like refer to reducing or ameliorating a disorder and/or symptoms associated therewith or obtaining a desired pharmacologic and/or physiologic effect. It will be appreciated that, although not precluded, treating a disorder or condition does not require that the disorder, condition or symptoms associated therewith be completely eliminated. In some embodiments, the effect is therapeutic, i.e., without limitation, the effect partially or completely reduces, diminishes, abrogates, abates, alleviates, reduces the intensity of, or cures a disease and/or adverse symptom attributable to the disease. In some embodiments, the effect is preventative, i.e., the effect protects or prevents an occurrence or reoccurrence of a disease or condition. To this end, the presently disclosed methods comprise administering a therapeutically effective amount of a composition as described herein.

[0235] By “uracil glycosylase inhibitor” or “UGI” is meant an agent that inhibits the uracil-excision repair system. Base editors comprising a cytidine deaminase convert cytosine to uracil, which is then converted to thymine through DNA replication or repair. In various embodiments, a uracil DNA glycosylase (UGI) prevent base excision repair which changes the U back to a C. In some instances, contacting a cell and/or polynucleotide with a UGI and a base editor prevents base excision repair which changes the U back to a C. An exemplary UGI comprises an amino acid sequence as follows:

>splP14739IUNGI_BPPB2 Uracil-DNA
glycosylase inhibitor
(SEQ ID NO: 231)
MTNLSDIIEKETGKQLVIQESILMLPEEVEEVIGNKPESDILVHTAYDES
TDENVMLLTSDAPEYKPWALVIQDSNGENKIKML.

[0236] In some embodiments, the agent inhibiting the uracil-excision repair system is a uracil stabilizing protein (USP). See, e.g., WO 2022015969 A1, incorporated herein by reference.

[0237] As used herein, the term “vector” refers to a means of introducing a nucleic acid sequence into a cell, resulting in a transformed cell. Vectors include plasmids, transposons, phages, viruses, liposomes, lipid nanoparticles, and episomes.

[0238] Ranges provided herein are understood to be shorthand for all of the values within the range. For example, a range of 1 to 50 is understood to include any number, combination of numbers, or sub-range from the group consisting 1, 2, 3, 4, 5, 6, 7, 8, 9, 10, 11, 12, 13, 14, 15, 16, 17, 18, 19, 20, 21, 22, 23, 24, 25, 26, 27, 28, 29, 30, 31, 32, 33, 34, 35, 36, 37, 38, 39, 40, 41, 42, 43, 44, 45, 46, 47, 48, 49, or 50.

[0239] By “VHH domain” is meant an antigen binding domain of a heavy chain only antibody or an antigen binding fragment thereof.

[0240] A “VHH binding molecule” or “VHH antibody,” or simply “VHH,” as referred to herein is, in general, a single domain immunoglobulin molecule (antibody). A VHH (or VHH antibody) corresponds to the heavy chain of a VHH antibody having a single variable domain (or single variable region), e.g., a camelid-derived single variable H (V_{H}) domain antibody. A VHH typically has a molecular weight (MW) of about 12-15 kDa. VHH antibodies lack light chains. These heavy-chain antibody molecules contain a single variable domain (VHH) and, typically, two constant domains (CH₂ and CH₃). See, e.g., Methods in Molecular Biology, “Single Domain Antibodies—Methods and Protocols,” Eds. D. Saerens and S. Muyldermans, Humana Press (Springer), 2012. A cloned (recombinantly produced) and isolated VHH domain is a stable polypeptide harboring the antigen-binding capacity of the original heavy-chain antibody. See, e.g., U.S. Pat. Nos. 5,840,526 and 6,015,695, each of which is incorporated by reference herein in its entirety.

[0241] VHHs are efficiently expressed in E. coli, coupled to detection markers, such as a fluorescent marker, or conjugated with enzymes. The small size of VHHs permits their binding to epitopes (antigenic determinants in antigen proteins), e.g., “hidden epitopes” that are not accessible to whole antibodies of much larger size. As a therapeutic, a VHH is capable of efficient penetration and rapid clearance. Its single domain nature allows a VHH to be expressed in a cell without a requirement for supramolecular assembly, as is needed for whole antibodies which are typically tetrameric (two heavy chains and two light chains, having a MW of about 150 kDa). VHHs are also exhibit stability over time and have a longer half-life versus non-VHH antibody molecules, which comprise disulfide bonds that are susceptible to chemical reduction or enzymatic cleavage. Similar to immunoglobulins, VHHs may be modified post-translationally, e.g., to add chemical linkers, detectable moieties, such as fluorescent dyes, enzymes, substrates, chemiluminescent moieties, etc., or specific binding moieties, such as streptavidin, avidin, or biotin, etc., for use in the compositions and methods described herein.

[0242] The recitation of a listing of chemical groups in any definition of a variable herein includes definitions of that variable as any single group or combination of listed groups. The recitation of an embodiment for a variable or aspect herein includes that embodiment as any single embodiment or in combination with any other embodiments or portions thereof.

[0243] All terms are intended to be understood as they would be understood by a person skilled in the art. Unless defined otherwise, all technical and scientific terms used herein have the same meaning as commonly understood by one of ordinary skill in the art to which the disclosure pertains

[0244] In this application, the use of the singular includes the plural unless specifically stated otherwise. It must be noted that, as used in the specification, the singular forms “a,” “an” and “the” include plural referents unless the context clearly dictates otherwise. In this application, the use of “or” means “and/or” unless stated otherwise. Furthermore, use of the term “including” as well as other forms, such as “include”, “includes,” and “included,” is not limiting.

[0245] As used in this specification and claim(s), the words “comprising” (and any form of comprising, such as “comprise” and “comprises”), “having” (and any form of having, such as “have” and “has”), “including” (and any form of including, such as “includes” and “include”) or “containing” (and any form of containing, such as “contains” and “contain”) are inclusive or open-ended. This wording indicates that specified elements, features, components, and/or method steps are present, but does not exclude the presence of other elements, features, components, and/or method steps. Any embodiments specified as “comprising” a particular component(s) or element(s) are also contemplated as “consisting of” or “consisting essentially of” the particular component(s) or element(s) in some embodiments. It is contemplated that any embodiment discussed in this specification can be implemented with respect to any method or composition of the present disclosure, and vice versa. Furthermore, compositions of the present disclosure can be used to achieve methods of the present disclosure.

[0246] The term “about” or “approximately” means within an acceptable error range for the particular value as determined by one of ordinary skill in the art, which will depend in part on how the value is measured or determined, i.e., the limitations of the measurement system.

[0247] Reference in the specification to “some embodiments,” “an embodiment,” “one embodiment” or “other embodiments” means that a particular feature, structure, or characteristic described in connection with the embodiments is included in at least some embodiments, but not necessarily all embodiments, of the present disclosures.

### BRIEF DESCRIPTION OF THE DRAWINGS

[0248] FIGS. 1A and 1B provide plots showing binding of the indicated anti-CD5 VHH antibodies to CD5-expressing Jurkat cells.

[0249] FIGS. 2A and 2B provide plots providing representative data showing noncompetitive antibody binding (FIG. 2A) or competitive antibody binding (FIG. 2B). In FIGS. 2A and 2B Ab 1 was UCHT2, which was a control antibody capable of binding CD5, and Ab 2 was a CD5-binding polypeptide of the disclosure.

### DETAILED DESCRIPTION

[0250] The present disclosure features polypeptides capable of binding a cluster of differentiation 5 (CD5) antigen and polynucleotides encoding said CD5-binding polypeptides, compositions comprising the same, and methods for use thereof. The disclosure also features lipid nanoparticles comprising the CD5-binding polypeptides and methods for use thereof for delivery of a polynucleotide (e.g., a polynucleotide encoding a chimeric antigen receptor) to a T cell in vivo.

[0251] The various aspects of the disclosure are based, at least in part, on the discovery detailed in the Examples provided herein of new VHH antibodies capable of binding to a CD5 antigen.

### VHH Antibodies

[0252] In various aspects, the disclosure provides VHH antibodies, also known as “single-domain antibodies (sdAbs),” capable of binding a CD5 antigen, as well as polypeptides containing VHH domains or polynucleotides encoding the same. In embodiments, the CD5 bound by the VHH antibodies is associated with a disease or disorder, such as a neoplasia. In embodiments, the VHH binds an antigen associated with a target cell. In embodiments, the target cell is a neoplastic cell.

[0253] VHH domains are derived from sdAbs. Single-domain antibodies are antibody-derived therapeutic proteins that contain the unique structural and functional properties of naturally-occurring heavy-chain antibodies. These heavy-chain antibodies contain a single variable domain (VHH) and two constant domains (CH2 and CH3). Importantly, a cloned and isolated VHH domain is a stable polypeptide harboring the full antigen-binding capacity of the original heavy-chain antibody. Single-domain antibodies have a high homology with the VH domains of human antibodies and can be further humanized without any loss of activity. Importantly, Single-domain antibodies have a low immunogenic potential, which has been confirmed in primate studies with sdAb lead compounds.

[0254] Single-domain antibodies combine the advantages of conventional antibodies with important features of small molecule drugs. Like conventional antibodies, sdAbs show high target specificity, high affinity for their target, and low inherent toxicity. However, like small molecule drugs they can inhibit enzymes and readily access receptor clefts. Furthermore, sdAbs are stable, can be administered by means other than injection (see, e.g., WO2004041867A2, which is herein incorporated by reference in its entirety) and are easy to manufacture. Other advantages of sdAbs include recognizing uncommon or hidden epitopes as a result of their small size, binding into cavities or active sites of protein targets with high affinity and selectivity due to their unique 3-dimensional, drug format flexibility, tailoring of half-life and ease and speed of drug discovery.

[0255] Single-domain antibodies are encoded by single genes and are efficiently produced in almost all prokaryotic and eukaryotic hosts, e.g., E. coli (see, e.g., U.S. Pat. No. 6,765,087, which is herein incorporated by reference in its entirety), molds (for example Aspergillus or Trichoderma) and yeast (for example Saccharomyces, Kluyveromyces, Hansenula, or Pichia) (see, e.g., U.S. Pat. No. 6,838,254, which is herein incorporated by reference in its entirety).

[0256] VHHs, such as the anti-CD5 VHHs described herein, have a number of advantages over conventional antibodies and recombinant antibody domains, including (i) they are small monomeric proteins (14 kDa) that express and fold efficiently in recombinant hosts; (ii) they are more stable to extremes of pH and temperature compared with conventional antibodies; (iii) they typically bind conformational epitopes; and (iv) they are amenable to designed multimerization which often leads to higher potencies; and (v) they offer more therapeutic versatility, such as multispecificity, thus supporting their beneficial utility in treating diseases caused by or associated with CD5.

[0257] The amino acid sequences of representative anti-CD5 VHH antibodies described herein are provided in Table 1A below. Representative embodiments of the binding regions of the anti-CD5 VHHs include CDRs (CDR1, CDR2 and CDR3) as set forth in the sequences of representative anti-CD5 VHHs are presented in Tables 1A and 1B below. The CDR binding regions are positioned within framework (FR) regions (see Table 1C) of the VHH polypeptide (see Table 1A), which do not vary substantially in sequence between discrete anti-CD5 VHHs and which provide a “structural scaffold” for the CDRs, which bind to CD5. By way of non-limiting example, the binding of CDRs within FRs to a target protein (antigen), e.g., CD5, may be via conformational binding or interaction, electrostatic binding interaction, hydrogen bonding, Van der Waals forces, or hydrophobic bonding, or combinations thereof, as would be appreciated by those having skill in the art.

TABLE 1A
Anti-CD5 VHH antibody amino acid sequences.

| | | | SEQ |
|---|---|---|---|
| Clone | | | ID |
| Number | VHH Name | VHH Amino Acid Sequence | NO: |
| HCDR3 1 | | | |
| 199 | ABTX326 | QVQLVESGGGLVQPGGSLRLSCAASGRTFINYAAGWFRQA | 431 |
| | | PGKEREFVARISRSGGRTDYADSVKGRFTISRDNAKSTVY | |
| | | LQMNSLRPEDTAVYYCAEATVWEFTDGADQYDYWGQGTQV | |
| | | TVSS | |
| HCDR3 12 | | | |
| 662 | | EVQLVESGGGLVQAGGSLRLSCAASGRTFGSYTMGWFRQA | 432 |
| | | PGKEREFVAAISWSAGRTYYADSMKGRFTISRDNAKNTVY | |
| | | LQMNSLKPEDTAVYYCAADPWTSDSDYDRLTMYDYWGQGT | |
| | | QVTVSS | |
| 661 | | EVQLVESGGGLVQAGGSLRLSCAASGRTFGTYTMGWFRQA | 433 |
| | | PGKEREFVAAISWSAGRTYYADSMKGRFTISRDNAKNTVY | |
| | | LQMNSLKPEDTAVYYCAADPWTSDSDYDRLTMYDYWGQGT | |
| | | QVTVSS | |
| 641 | | QVQLQESGGGLVQAGGSLRLSCAASGRTFGSYTMGWFRQA | 434 |
| | | PGKEREFVAAISWSAGRTYYADSMKGRFTISRDNAKNTVY | |
| | | LQMNSLKPEDTAVYYCAADPWTSDSDYDRLTMYDYWGQGT | |
| | | QVTVSS | |
| 636 | | QVQLQESGGGLVQAGGSLRLSCAASGRTFGTYTMGWFRQA | 435 |
| | | PGKEREFVAAISWSAGRTYYADSMKGRFTISRDNAKNTVY | |
| | | LQMNSLKPEDTAVYYCAADPWTSDSDYDRLTMYDYWGQGT | |
| | | QVTVSS | |
| 739 | | QVQLQESGGGLVQAGGSLRLSCAASGRTFGTYTMGWFRQA | 436 |
| | | PGKGREFVAAISWSAGRTYYADSMKGRFTISRDNAKNTVY | |
| | | LQMNSLKPEDTAVYYCAADPWTSDSDYDRLTMYDYWGQGT | |
| | | QVTVSS | |
| 667 | | QVQLVESGGGLVQAGGSLRLSCAASGRTFGSYTMGWFRQA | 437 |
| | | PGKEREFVAAISWSAGRTYYADSMKGRFTISRDNAKNTVY | |
| | | LQMNSLKPEDTAVYYCAADPWTSDSDYDRLTMYDYWGQGT | |
| | | QVTVSS | |
| 657 | | QVQLVESGGGLVQAGGSLRLSCAASGRTFGTYTMGWFRQA | 438 |
| | | PGKEREFVAAI SWSAGRTYYADSMKGRFTISRDNAKNTVY | |
| | | LQMNSLKPEDTAVYYCAADPWTSDSDYDRLTMYDYWGQGT | |
| | | QVTVSS | |
| 502 | ABTX315 | QVQLVESGGGLVQAGGSLRLSCAASGRTFGTYTMGWFRQA | 439 |
| | | PGREREFVAAISWSAGRTYYADSMKGRFTISRDNAKNTVY | |
| | | LQMNSLKPEDTAVYYCAADPWTSDSDYDRLTMYDYWGQGT | |
| | | QVTVSS | |
| HCDR3 13 | | | |
| 727 | | EVQLVESGGGLVQAGGSLRLSCAASGGTVSSYAMGWFRQA | 440 |
| | | PGKEREFVAVISWSGGRTYYADSVKGRFTISRDNAKNTVN | |
| | | LQMNSLKPEDTAVYYCAADPWTSDSDYERLTMYDYWGQGT | |
| | | QVTVSS | |
| 630 | | EVQLVESGGGLVQAGGSRRLSCAASGGTVSSYAMGWFRQA | 441 |
| | | PGKEREFVAVISWSGGRTYYADSVKGRFTISRDNAKNTVY | |
| | | LQMNSLKPEDTAVYYCAADPWTSDSDYERLTMYDYWGQGT | |
| | | QVTVSS | |
| 525 | ABTX316 | QVQLVESGGGLVQAGGSLRLSCAASGGTVSSYAMGWFRQA | 442 |
| | | PGKEREFVAVISWSGGRTYYADSVKGRFTISRDNAKNTVN | |
| | | LQMNSLKPEDTAVYYCAADPWTSDSDYERLTMYDYWGQGT | |
| | | QVTVSS | |
| 728 | | QVQLVESGGGLVQAGGSLRLSCAASGGTVSSYAMGWFRQA | 443 |
| | | PGKEREFVAVISWSGGRTYYADSVKGRFTISRDNAKNTVY | |
| | | LQMNSLKPEDTAVYYCAADPWTSDSDYERLTMYDYWGQGT | |
| | | QVTVSS | |
| HCDR3 15 | | | |
| 133 | | EVQLVESGGGLVQAGASLRLSCAASGRTTYNMGWFRHAPG | 444 |
| | | KDREFVAAIDLYGRATRYANSVKGRFTISRDNAKNTVYLQ | |
| | | MNSLKPEDTAVYYCAADTSLPLGVLTESQRLYGAWGQGTQ | |
| | | VTVSS | |
| 242 | | QVQLQESGGGLVQAGASLRLSCAASGRATYNMGWFRHAPG | 445 |
| | | EDREFVAAINLEGYATRYANSVKGRFTISRDNAKNTVYLQ | |
| | | MNSLKPEDTAVYYCAADTSLPLGVLTESQRLYGAWGQGTQ | |
| | | VTVSS | |
| 218 | | QVQLQESGGGLVQAGASLRLSCAASGRTTYNMGWFRHAPG | 446 |
| | | KDREFVAAIDLYGRATRYANSVKGRFTISRDNAKNTVYLQ | |
| | | MNSLKPEDTAVYYCAADTSLPLGVLTESQRLYGAWGQGTQ | |
| | | VTVSS | |
| 309 | | QVQLQESGGGLVQAGASLRLSCAASGRTTYNMGWFRHAPG | 447 |
| | | KDREFVAAIDLYGRATRYANSVRGRFTISRDNAKNTVYLQ | |
| | | MNSLKPEDTAVYYCAADTSLPLGVLTESQRLYGAWGQGTQ | |
| | | VTVSS | |
| 225 | ABTX331 | QVQLVESGGGLVQAGASLRLSCAASGRTTYNMGWFRHAPG | 448 |
| | | KDREFVAAIDLYGRATRYANSVKGRFTISRDNAKNTVYLQ | |
| | | MNSLKPEDTAVYYCAADTSLPLGVLTESQRLYGAWGQGTQ | |
| | | VTVSS | |
| HCDR3 17 | | | |
| 280 | ABTX317 | QVQLVESGGGLVQAGASLRLSCAASGRTTYNMGWFRHAPG | 449 |
| | | KDREFVAAIDLYGRATRYANSVKGRFTISRDNAKNTVYLQ | |
| | | MNSLKPEDTAVYYCAADTSLPLGVLTKSQRMYGAWGQGTQ | |
| | | VTVSS | |
| HCDR3 28 | | | |
| 294 | | QVQLQESGGGSVQAGGSLRLSCAASGRAFSAYAMGWFRQA | 450 |
| | | PGKEREFVAAINWNGDTALRWNGFATRYADSVKGRFIISR | |
| | | VNAKNTVNLQMNSLKPEDTAVYYCAADTVVSGSYYLAARA | |
| | | EDYEYWGQGTQVSVSS | |
| 333 | ABTX318 | QVQLQESGGGSVQAGGSLRLSCAASGRAFSAYAMGWFRQA | 451 |
| | | PGKEREFVAAINWNGDTALRWNGFATRYADSVKGRFTISR | |
| | | VIAKNTVNLQMNSLKPEDTAVYYCAADTVVSGSYYLAARA | |
| | | EDYEYWGQGTQVTVSS | |
| 253 | | QVQLQESGGGSVQAGGSLRLSCAASGRAFSAYAMGWFRQA | 452 |
| | | PGKEREFVAAINWNGDTALRWNGFATRYADSVKGRFTISR | |
| | | VNAKNTVNLQMNSLKPEDTAVYYCAADTVVSGSYYLAARA | |
| | | EDYEYWGQGTQVSVSS | |
| 86 | | QVQLQESGGGSVQAGGSLRLSCAASGRAFSAYAMGWFRQA | 453 |
| | | PGKEREFVAAINWNGDTALRWNGFATRYADSVKGRFTISR | |
| | | VNAKNTVNLQMNSLKPEDTAVYYCAADTVVSGSYYLAARA | |
| | | EDYEYWGQGTQVTVSS | |
| HCDR3 50 | | | |
| 71 | | EVQLVESGGGLVQAGGSLRLSCAASGPAFSSSGMGWFRQA | 454 |
| | | PGKARDFVASMDWSGGSTYYGDSVKGRFTVSRDNAKNTVH | |
| | | LQMNSLRPEDTAVYYCARGTSGVAAVNLRGFFSWGPGTQV | |
| | | TVSS | |
| 3 | | QVQLQESGGGLVQAGGSLRLSCAASGPAFSSSGMGWFRQA | 455 |
| | | PGKARDFVASIDWSGGSTYYGDSVKGRFTVSRDNAKNTVH | |
| | | LQMNSLRPEDTAVYYCARGTSGVAAVNLRGFFSWGPGTQV | |
| | | TVSS | |
| 15 | | QVQLVESGGGLVQAGGSLRLACAASGAAFSSSGMGWFRQA | 456 |
| | | PGKARDFVASMDWSGGSTYYGDSVKGRFTVSRDNAKNTVH | |
| | | LQMNSLRPEDTAVYYCARGTSGVAAVNLRGFFSWGPGTQV | |
| | | TVSS | |
| 43 | | QVQLVESGGGLVQAGGSLRLSCAASGPAFSSSGMGWFRQA | 457 |
| | | PGKARDFVASIDWGGGSTYYGDSVKGRFTVSRDNAKNAVH | |
| | | LQMNSLRPEDTAVYYCARGTSGVAAVNLRGFFSWGPGTQV | |
| | | TVSS | |
| 5 | | QVQLVESGGGLVQAGGSLRLSCAASGPAFSSSGMGWFRQA | 458 |
| | | PGKARDFVASIDWSGGSTYYGDSVKGRFTVSRDNAKNTVH | |
| | | LQMNSLRPEDTAVYYCARGTSGVAAVNLRGFFSWGPGTQV | |
| | | TVSS | |
| 148 | | QVQLVESGGGLVQAGGSLRLSCAASGPAFSSSGMGWFRQA | 459 |
| | | PGKARDFVASIDWSGKSTYYGDSVKGRFTVSRDNAKNTVH | |
| | | LQMNSLRPEDTAVYYCARGTSGVAAVNLRGFFSWGPGTQV | |
| | | TVSS | |
| 51 | | QVQLVESGGGLVQAGGSLRLSCAASGPAFSSSGMGWFRQA | 460 |
| | | PGKARDFVASINWSGGSAYYGDSVKGRFTVSRDNAKNTVH | |
| | | LQMNSLRPEDTAVYYCARGTSGVAAVNLRGFFSWGPGTQV | |
| | | TVSS | |
| 84 | | QVQLVESGGGLVQAGGSLRLSCAASGPAFSSSGMGWFRQA | 461 |
| | | PGKARDFVASMDWSGGSTYYGDSVKGRFTVSRDNAKNTVH | |
| | | LQMNSLRPEDTAVYYCARGTSGVAAVNLRGFFSWGPGTQV | |
| | | TVSS | |
| 157 | ABTX320 | QVQLVESGGGLVQAGGSLRLSCAASGPAFSSSGMGWFRQA | 462 |
| | | PGKAREFVASMDWTGGSTYYGDSVKGRFTVSRDNAKMTVH | |
| | | LQMNSLRPEDTAVYYCARGTSGVAAVNLRGFFSWGPGTQV | |
| | | TVSS | |
| HCDR3 63 | | | |
| 660 | ABTX322 | QLQLVESGGGLVQPGGSLRLSCAASGSDFLVDATTWFRQA | 463 |
| | | PGNQREFVAIMDIGGVTEYADSVKGRFTISRDHTKNTVYL | |
| | | QMNSLKVEDTAVYYCNTRGLWGQGTLVTVSS | |
| HCDR3 65 | | | |
| 155 | ABTX323 | QVQLQESGGGLVQAGGSLRLSCATSGITSSINVIGWYRQA | 464 |
| | | PGKQRELVALVNSGGQTHYADSVKGRFTISRDNAKNTVFL | |
| | | QMNSLKPEDTAEYYCHGRYGIDNYWGEGTQVTVSS | |
| HCDR3 66 | | | |
| 563 | ABTX330 | EVQLVESGGGLVQPGGSLRLSCAASGFPFSSSFMSWVRQA | 465 |
| | | PGKGLEWVSTIYSDGSTYYADSVKGRFTISRDNAKKTAYL | |
| | | QMNSLKAEDTAVYYCATVTGSIRGQGTQVTVSS | |
| 500 | | QVQLVESGGGLVQPGGSLRLSCAASGFNFSSSFMSWVRQA | 466 |
| | | PGKEVEWVSTIYSDGSTYYADSMKGRFTISRDNAKNTVYL | |
| | | QMSNLKAEDTAVYYCATVTGSIRGQGTQVTVSS | |
| HCDR3 67 | | | |
| 550 | ABTX324 | QVQLVESGGGLVQPGGSVRLSCATSGSIFSTNVMGWYRQA | 467 |
| | | PGKEREFVALIRGGGSTHYADSVKGRFIISRENAKTTVYL | |
| | | QMNGLKPEDTAVYYCVIWLGSPGAMSDYWGQGTQVTVSS | |
| HCDR3 68 | | | |
| 647 | | EVQLVESGGGLVQPGGSLRLSCAASGSVVSTNNMGWYRQA | 468 |
| | | PGKEREFVALIRTGGSTHVADSMKGRFTISRENAKNTVYL | |
| | | QMNSLKPEDTAVYYCVIWTGSPGALSDYWGQGTQVTVSS | |
| 420 | ABTX325 | QVQLVESGGGLVQPGGSLRLSCAASGSDASTNNMAWYRQA | 469 |
| | | PGKEREFVALIRTGGSTHVADSMKGRFTISRENAKNTVYL | |
| | | QMNSLKPEDTAVYYCVIWTGSPGALSDYWGQGTQVTVSS | |
| HCDR3 60 | | | |
| 1065 | | QLQLVESGGGLVQPGESLRLSCAASGFSFSRVAMNWYRQA | 470 |
| | | PGKERELVATISSDGSRTNYAHSVKGRFTISRENAKNMVY | |
| | | LQMNSLKLEDTAVYYCNVPGNSWGQGTQVTVSS | |
| 1091 | ABTX329 | QLQLVESGGGLVQPGESLRLSCAASGFSFSRVGMNWYRQA | 471 |
| | | PGKERELVASISSDGSRTNYAHFVKGRFTISRDNVKNMVY | |
| | | LQMNSLKLEDTAVYYCNVPGNSWGQGTQVTVSS | |
| HCDR3 57 | | | |
| 1043 | ABTX321 | QLQLVESGGGLVQPGESLRLSCVVSGDIFSFVGWGWYRQA | 472 |
| | | PGKQREVVAQISTGGLTNYADSVKGRFAISRDNAKRTVYL | |
| | | QMNSLKFEDTAVYYCNVPGHPWGQGTQVTVSS | |
| HCDR3 58 | | | |
| 1050 | ABTX328 | QVQLVESGGGLVQPGESLRLSCVVSGDIFSFIGWGWYRQA | 473 |
| | | PGKQRELVAQINTGGLTDYADSVKGRFTISRDNAKRTVYL | |
| | | QMNSLKFEDTAVYYCNFPGHSWGQGTQVTVSS | |
| HCDR3 43 | | | |
| 917 | ABTX319 | QVQLVESGGGLVQPGGSLRLSCAASGFTFSMYSMSWVRQA | 474 |
| | | PGKRLEWVSSISTGARDTAYADSVKGRFTISRDNADNTLY | |
| | | LHMNNLKPEDTAVYYCANGDLRYGPDGYDYRGQGTQVTVS | |
| | | S | |
| 928 | | QVQLVESGGGLVQPGGSLRLSCAASGFTFSMYSMSWVRQA | 475 |
| | | PGKRLEWVSSISTGARDTAYADSVKGRFTISRDNADNTLY | |
| | | LHMNNLKPEDTAVYYCANGDLRYGPDGYDYRGQGTQVTVV | |
| | | S | |
| 923 | | QVQLVESGGGLVQPGGSLRLSCAASGFTFSMYSMSWVRQA | 476 |
| | | PGKRLEWVSSISTGARDTSYADSVKGRFTISRDNADNTLY | |
| | | LHMNNLKPEDTAVYYCANGDLRYGPDGYDYRGQGTQVTVS | |
| | | S | |
| HCDR3 46 | | | |
| 834 | ABTX327 | QVQLVESGGGLVQPGGSLRLSCVASGGTFSTYGMGWFRQA | 477 |
| | | PGKEREFVAVITGSGVGTQYADSVKDRFTISRENAKNTVY | |
| | | LQMNTLKLEDTAVYYCVSGHRPGWAVIRADAYEYWGQGTQ | |
| | | VTVSS | |

Embodiments of complementarity determining regions (CDRs) are underlined in each sequence, where the CDRs, from N-terminus to C-terminus, are CDR1, CDR2, and CDR3. The non-underlined portions of each sequence correspond, in order from N-terminus to C-terminus, FR1, FR2, FR3, and FR4.

TABLE 1B
Anti-CD5 VHH antibody complementarity determining region
(CDR) amino acid sequences.

| Clone | VHH | CD | SEQ | | SEQ | | SEQ |
|---|---|---|---|---|---|---|---|
| Number | Name | R1 | ID NO | CDR2 | ID NO | CDR3 | ID NO |
| HCDR3 1 | | | | | | | |
| 199 | ABTX | NYA | 478 | RISRSGGRTDYADSV | 486 | ATVWEFTDGADQ | 498 |
| | 326 | AG | | KG | | YDY | |
| HCDR3 12 | | | | | | | |
| 662 | | SYT | 479 | AISWSAGRTYYADSM | 487 | DPWTSDSDYDRL | 499 |
| | | MG | | KG | | TMYDY | |
| 661 | | TYT | 480 | AISWSAGRTYYADSM | 487 | DPWTSDSDYDRL | 499 |
| | | MG | | KG | | TMYDY | |
| 641 | | SYT | 479 | AISWSAGRTYYADSM | 487 | DPWTSDSDYDRL | 499 |
| | | MG | | KG | | TMYDY | |
| 636 | | TYT | 480 | AISWSAGRTYYADSM | 487 | DPWTSDSDYDRL | 499 |
| | | MG | | KG | | TMYDY | |
| 739 | | TYT | 480 | AISWSAGRTYYADSM | 487 | DPWTSDSDYDRL | 499 |
| | | MG | | KG | | TMYDY | |
| 667 | | SYT | 479 | AISWSAGRTYYADSM | 487 | DPWTSDSDYDRL | 499 |
| | | MG | | KG | | TMYDY | |
| 657 | | TYT | 480 | AISWSAGRTYYADSM | 487 | DPWTSDSDYDRL | 499 |
| | | MG | | KG | | TMYDY | |
| 502 | ABTX | TYT | 480 | AISWSAGRTYYADSM | 487 | DPWTSDSDYDRL | 499 |
| | 315 | MG | | KG | | TMYDY | |
| HCDR3 13 | | | | | | | |
| 727 | | SYA | 481 | VISWSGGRTYYADSV | 488 | DPWTSDSDYERL | 500 |
| | | MG | | KG | | TMYDY | |
| 630 | | SYA | 481 | VISWSGGRTYYADSV | 488 | DPWTSDSDYERL | 500 |
| | | MG | | KG | | TMYDY | |
| 525 | ABTX | SYA | 481 | VISWSGGRTYYADSV | 488 | DPWTSDSDYERL | 500 |
| | 316 | MG | | KG | | TMYDY | |
| 728 | | SYA | 481 | VISWSGGRTYYADSV | 488 | DPWTSDSDYERL | 500 |
| | | MG | | KG | | TMYDY | |
| HCDR3 15 | | | | | | | |
| 133 | | TYN | 482 | AIDLYGRATRYANSV | 489 | DTSLPLGVLTES | 501 |
| | | MG | | KG | | QRLYGA | |
| 242 | | TYN | 482 | AINLEGYATRYANSV | 489 | DTSLPLGVLTES | 501 |
| | | MG | | KG | | QRLYGA | |
| 218 | | TYN | 482 | AIDLYGRATRYANSV | 489 | DTSLPLGVLTES | 501 |
| | | MG | | KG | | QRLYGA | |
| 309 | | TYN | 482 | AIDLYGRATRYANSV | 489 | DTSLPLGVLTES | 501 |
| | | MG | | RG | | QRLYGA | |
| 225 | ABTX | TYN | 482 | AIDLYGRATRYANSV | 489 | DTSLPLGVLTES | 501 |
| | 331 | MG | | KG | | QRLYGA | |
| HCDR3 17 | | | | | | | |
| 280 | ABTX | TYN | 482 | AIDLYGRATRYANSV | 489 | DTSLPLGVLTKS | 502 |
| | 317 | MG | | KG | | QRMYGA | |
| HCDR3 28 | | | | | | | |
| 294 | | AYA | 483 | AINWNGDTALRWNGF | 490 | DTVVSGSYYLAA | 503 |
| | | MG | | ATRYADSVKG | | RAEDYEY | |
| 333 | ABTX | AYA | 483 | AINWNGDTALRWNGF | 490 | DTVVSGSYYLAA | 503 |
| | 318 | MG | | ATRYADSVKG | | RAEDYEY | |
| 253 | | AYA | 483 | AINWNGDTALRWNGF | 490 | DTVVSGSYYLAA | 503 |
| | | MG | | ATRYADSVKG | | RAEDYEY | |
| 86 | | AYA | 483 | AINWNGDTALRWNGF | 490 | DTVVSGSYYLAA | 503 |
| | | MG | | ATRYADSVKG | | RAEDYEY | |
| HCDR3 50 | | | | | | | |
| 71 | | SSG | 484 | SMDWSGGSTYYGDSV | 491 | GTSGVAAVNLRG | 504 |
| | | MG | | KG | | FFS | |
| 3 | | SSG | 484 | SIDWSGGSTYYGDSV | 492 | GTSGVAAVNLRG | 504 |
| | | MG | | KG | | FFS | |
| 15 | | SSG | 484 | SMDWSGGSTYYGDSV | 491 | GTSGVAAVNLRG | 504 |
| | | MG | | KG | | FFS | |
| 43 | | SSG | 484 | SIDWGGGSTYYGDSV | 493 | GTSGVAAVNLRG | 504 |
| | | MG | | KG | | FFS | |
| 5 | | SSG | 484 | SIDWSGGSTYYGDSV | 492 | GTSGVAAVNLRG | 504 |
| | | MG | | KG | | FFS | |
| 148 | | SSG | 484 | SIDWSGKSTYYGDSV | 494 | GTSGVAAVNLRG | 504 |
| | | MG | | KG | | FFS | |
| 51 | | SSG | 484 | SINWSGGSAYYGDSV | 495 | GTSGVAAVNLRG | 504 |
| | | MG | | KG | | FFS | |
| 84 | | SSG | 484 | SMDWSGGSTYYGDSV | 491 | GTSGVAAVNLRG | 504 |
| | | MG | | KG | | FFS | |
| 157 | ABTX | SSG | 484 | SMDWTGGSTYYGDSV | 496 | GTSGVAAVNLRG | 504 |
| | 320 | MG | | KG | | FFS | |
| HCDR3 63 | | | | | | | |
| 660 | ABTX | VDA | 485 | IMDIGGVTEYADSVK | 497 | RGL | |
| | 322 | TT | | G | | | |
| HCDR3 65 | | | | | | | |
| 155 | ABTX | INV | 505 | LVNSGGQTHYADSVK | 516 | RYGIDNY | 528 |
| | 323 | IG | | G | | | |
| HCDR3 66 | | | | | | | |
| 563 | ABTX | SSF | 506 | TIYSDGSTYYADSVK | 517 | VTGSI | 529 |
| | 330 | MS | | G | | | |
| 500 | | SSF | 506 | TIYSDGSTYYADSMK | 518 | VTGSI | 529 |
| | | MS | | G | | | |
| HCDR3 67 | | | | | | | |
| 550 | ABTX | TNV | 507 | LIRGGGSTHYADSVK | 519 | WLGSPGAMSDY | 530 |
| | 324 | MG | | G | | | |
| HCDR3 68 | | | | | | | |
| 647 | | TNN | 508 | LIRTGGSTHVADSMK | 520 | WTGSPGALSDY | 531 |
| | | MG | | G | | | |
| 420 | ABTX | TNN | 509 | LIRTGGSTHVADSMK | 520 | WTGSPGALSDY | 531 |
| | 325 | MA | | G | | | |
| HCDR3 60 | | | | | | | |
| 1065 | | RVA | 510 | TISSDGSRTNYAHSV | 522 | PGNS | 532 |
| | | MN | | KG | | | |
| 1091 | ABTX | RVG | 511 | SISSDGSRTNYAHFV | 523 | PGNS | 532 |
| | 329 | MN | | KG | | | |
| HCDR3 57 | | | | | | | |
| 1043 | ABTX | FVG | 512 | QISTGGLTNYADSVK | 524 | PGHP | 533 |
| | 321 | WG | | G | | | |
| HCDR3 58 | | | | | | | |
| 1050 | ABTX | FIG | 513 | QINTGGLTDYADSVK | 525 | PGHS | 534 |
| | 328 | WG | | G | | | |
| HCDR3 43 | | | | | | | |
| 917 | ABTX | MYS | 514 | SISTGARDTAYADSV | 526 | GDLRYGPDGYDY | 535 |
| | 319 | MS | | KG | | | |
| 928 | | MYS | 514 | SISTGARDTAYADSV | 526 | GDLRYGPDGYDY | 535 |
| | | MS | | KG | | | |
| 923 | | MYS | 514 | SISTGARDTSYADSV | 526 | GDLRYGPDGYDY | 535 |
| | | MS | | KG | | | |
| HCDR3 46 | | | | | | | |
| 834 | ABTX | TYG | 515 | VITGSGVGTQYADSV | 527 | GHRPGWAVIRAD | 536 |
| | 327 | MG | | KD | | AYEY | |

TABLE 1C
Anti-CD5 VHH antibody framework region (FR) amino acid sequences.

| | | | SEQ | | SEQ | | SEQ | | SEQ |
|---|---|---|---|---|---|---|---|---|---|
| Clone | VHH | | ID | | ID | | ID | | ID |
| Number | Name | FR1 | NO | FR2 | NO | FR3 | NO | FR4 | NO |
| HCDR3 1 | | | | | | | | | |
| 199 | ABTX3 | QVQLVESG | 537 | WFRQAPG | 539 | RFTISRD | 540 | WGQG | 542 |
| | 26 | GGLVQPGG | | KEREFVA | | NAKSTVY | | TQVT | |
| | | SLRLSCAA | | | | LQMNSLR | | VSS | |
| | | SGRTFI | | | | PEDTAVY | | | |
| | | | | | | YCAE | | | |
| HCDR3 12 | | | | | | | | | |
| 662 | | EVQLVESG | 538 | WFRQAPG | 539 | RFTISRD | 541 | WGQG | 542 |
| | | GGLVQAGG | | KEREFVA | | NAKNTVY | | TQVT | |
| | | SLRLSCAA | | | | LQMNSLK | | VSS | |
| | | SGRTFG | | | | PEDTAVY | | | |
| | | | | | | YCAA | | | |
| 661 | | EVQLVESG | 538 | WFRQAPG | 539 | RFTISRD | 541 | WGQG | 542 |
| | | GGLVQAGG | | KEREFVA | | NAKNTVY | | TQVT | |
| | | SLRLSCAA | | | | LQMNSLK | | VSS | |
| | | SGRTFG | | | | PEDTAVY | | | |
| | | | | | | YCAA | | | |
| 641 | | QVQLQESG | 543 | WFRQAPG | 539 | RFTISRD | 541 | WGQG | 542 |
| | | GGLVQAGG | | KEREFVA | | NAKNTVY | | TQVT | |
| | | | | | | LQMNSLK | | VSS | |
| | | SLRLSCAA | | | | PEDTAVY | | | |
| | | SGRTFG | | | | YCAA | | | |
| 636 | | QVQLQESG | 543 | WFRQAPG | 539 | RFTISRD | 541 | WGQG | 542 |
| | | GGLVQAGG | | KEREFVA | | NAKNTVY | | TQVT | |
| | | SLRLSCAA | | | | LQMNSLK | | VSS | |
| | | SGRTFG | | | | PEDTAVY | | | |
| | | | | | | YCAA | | | |
| 739 | | QVQLQESG | 543 | WFRQAPG | 620 | RFTISRD | 541 | WGQG | 542 |
| | | GGLVQAGG | | KGREFVA | | NAKNTVY | | TQVT | |
| | | SLRLSCAA | | | | LQMNSLK | | VSS | |
| | | SGRTFG | | | | PEDTAVY | | | |
| | | | | | | YCAA | | | |
| 667 | | QVQLVESG | 619 | WFRQAPG | 539 | RFTISRD | 541 | WGQG | 542 |
| | | GGLVQAGG | | KEREFVA | | NAKNTVY | | TQVT | |
| | | SLRLSCAA | | | | LQMNSLK | | VSS | |
| | | SGRTFG | | | | PEDTAVY | | | |
| | | | | | | YCAA | | | |
| 657 | | QVQLVESG | 619 | WFRQAPG | 539 | RFTISRD | 541 | WGQG | 542 |
| | | GGLVQAGG | | KEREFVA | | NAKNTVY | | TQVT | |
| | | SLRLSCAA | | | | LQMNSLK | | VSS | |
| | | SGRTFG | | | | PEDTAVY | | | |
| | | | | | | YCAA | | | |
| 502 | ABTX3 | QVQLVESG | 619 | WFRQAPG | 621 | RFTISRD | 541 | WGQG | 542 |
| | 15 | GGLVQAGG | | REREFVA | | NAKNTVY | | TQVT | |
| | | SLRLSCAA | | | | LQMNSLK | | VSS | |
| | | SGRTFG | | | | PEDTAVY | | | |
| | | | | | | YCAA | | | |
| HCDR3 13 | | | | | | | | | |
| 727 | | EVQLVESG | 544 | WFRQAPG | 539 | RFTISRD | 547 | WGQG | 542 |
| | | GGLVQAGG | | KEREFVA | | NAKNTVN | | TQVT | |
| | | SLRLSCAA | | | | LQMNSLK | | VSS | |
| | | SGGTVS | | | | PEDTAVY | | | |
| | | | | | | YCAA | | | |
| 630 | | EVQLVESG | 545 | WFRQAPG | 539 | RFTISRD | 541 | WGQG | 542 |
| | | GGLVQAGG | | KEREFVA | | NAKNTVY | | TQVT | |
| | | SRRLSCAA | | | | LQMNSLK | | VSS | |
| | | SGGTVS | | | | PEDTAVY | | | |
| | | | | | | YCAA | | | |
| 525 | ABTX3 | QVQLVESG | 546 | WFRQAPG | 539 | RFTISRD | 547 | WGQG | 542 |
| | 16 | GGLVQAGG | | KEREFVA | | NAKNTVN | | TQVT | |
| | | SLRLSCAA | | | | LQMNSLK | | VSS | |
| | | SGGTVS | | | | PEDTAVY | | | |
| | | | | | | YCAA | | | |
| 728 | | QVQLVESG | 546 | WFRQAPG | 539 | RFTISRD | 541 | WGQG | 542 |
| | | GGLVQAGG | | KEREFVA | | NAKNTVY | | TQVT | |
| | | SLRLSCAA | | | | LQMNSLK | | VSS | |
| | | SGGTVS | | | | PEDTAVY | | | |
| | | | | | | YCAA | | | |
| HCDR3 15 | | | | | | | | | |
| 133 | | EVQLVESG | 548 | WFRHAPG | 552 | RFTISRD | 541 | WGQG | 542 |
| | | GGLVQAGA | | KDREFVA | | NAKNTVY | | TQVT | |
| | | SLRLSCAA | | | | LQMNSLK | | VSS | |
| | | SGRT | | | | | | | |
| | | | | | | PEDTAVY | | | |
| | | | | | | YCAA | | | |
| 242 | | QVQLQESG | 549 | WERHAPG | 553 | RFTISRD | 541 | WGQG | 542 |
| | | GGLVQAGA | | EDREFVA | | NAKNTVY | | TQVT | |
| | | SLRLSCAA | | | | LQMNSLK | | VSS | |
| | | SGRA | | | | PEDTAVY | | | |
| | | | | | | YCAA | | | |
| 218 | | QVQLQESG | 550 | WFRHAPG | 552 | RFTISRD | 541 | WGQG | 542 |
| | | GGLVQAGA | | KDREFVA | | NAKNTVY | | TQVT | |
| | | SLRLSCAA | | | | LQMNSLK | | VSS | |
| | | SGRT | | | | PEDTAVY | | | |
| | | | | | | YCAA | | | |
| 309 | | QVQLQESG | 550 | WFRHAPG | 552 | RFTISRD | 541 | WGQG | 542 |
| | | GGLVQAGA | | KDREFVA | | NAKNTVY | | TQVT | |
| | | SLRLSCAA | | | | LQMNSLK | | VSS | |
| | | SGRT | | | | PEDTAVY | | | |
| | | | | | | YCAA | | | |
| 225 | ABTX3 | QVQLVESG | 551 | WFRHAPG | 552 | RFTISRD | 541 | WGQG | 542 |
| | 31 | GGLVQAGA | | KDREFVA | | NAKNTVY | | TQVT | |
| | | SLRLSCAA | | | | LQMNSLK | | VSS | |
| | | SGRT | | | | PEDTAVY | | | |
| | | | | | | YCAA | | | |
| HCDR3 17 | | | | | | | | | |
| 280 | ABTX3 | QVQLVESG | 551 | WFRHAPG | 552 | RFTISRD | 541 | WGQG | 542 |
| | 17 | GGLVQAGA | | KDREFVA | | NAKNTVY | | TQVT | |
| | | SLRLSCAA | | | | LQMNSLK | | VSS | |
| | | SGRT | | | | PEDTAVY | | | |
| | | | | | | YCAA | | | |
| HCDR3 28 | | | | | | | | | |
| 294 | | QVQLQESG | 554 | WFRQAPG | 539 | RFIISRV | 555 | WGQG | 557 |
| | | GGSVQAGG | | KEREFVA | | NAKNTVN | | TQVS | |
| | | SLRLSCAA | | | | LQMNSLK | | VSS | |
| | | SGRAFS | | | | PEDTAVY | | | |
| | | | | | | YCAA | | | |
| 333 | ABTX3 | QVQLQESG | 554 | WFRQAPG | 539 | RFTISRV | 556 | WGQG | 542 |
| | 18 | GGSVQAGG | | KEREFVA | | IAKNTVN | | TQVT | |
| | | SLRLSCAA | | | | LQMNSLK | | VSS | |
| | | SGRAFS | | | | PEDTAVY | | | |
| | | | | | | YCAA | | | |
| 253 | | QVQLQESG | 554 | WFRQAPG | 539 | RFTISRV | 558 | WGQG | 557 |
| | | GGSVQAGG | | KEREFVA | | NAKNTVN | | TQVS | |
| | | SLRLSCAA | | | | LQMNSLK | | VSS | |
| | | SGRAFS | | | | PEDTAVY | | | |
| | | | | | | YCAA | | | |
| 86 | | QVQLQESG | 554 | WFRQAPG | 539 | RFTISRV | 558 | WGQG | 542 |
| | | GGSVQAGG | | KEREFVA | | NAKNTVN | | TQVT | |
| | | SLRLSCAA | | | | LQMNSLK | | VSS | |
| | | SGRAFS | | | | PEDTAVY | | | |
| | | | | | | YCAA | | | |
| HCDR3 50 | | | | | | | | | |
| 71 | | EVQLVESG | 559 | WFRQAPG | 563 | RFTVSRD | 564 | WGPG | 566 |
| | | GGLVQAGG | | KARDFVA | | NAKNTVH LQMNSLR | | TQVT | |
| | | | | | | | | VSS | |
| | | SLRLSCAA | | | | PEDTAVY | | | |
| | | SGPAFS | | | | YCAR | | | |
| 3 | | QVQLQESG | 560 | WFRQAPG | 563 | RFTVSRD | 564 | WGPG | 566 |
| | | GGLVQAGG | | KARDFVA | | NAKNTVH | | TQVT | |
| | | SLRLSCAA | | | | LQMNSLR | | VSS | |
| | | SGPAFS | | | | PEDTAVY | | | |
| | | | | | | YCAR | | | |
| 15 | | QVQLVESG | 561 | WFRQAPG | 563 | RFTVSRD | 564 | WGPG | 566 |
| | | GGLVQAGG | | KARDFVA | | NAKNTVH | | TQVT | |
| | | SLRLACAA | | | | LQMNSLR | | VSS | |
| | | SGAAFS | | | | PEDTAVY | | | |
| | | | | | | YCAR | | | |
| 43 | | QVQLVESG | 561 | WFRQAPG | 563 | RFTVSRD | 565 | WGPG | 566 |
| | | GGLVQAGG | | KARDFVA | | NAKNAVH | | TQVT | |
| | | SLRLSCAA | | | | LQMNSLR | | VSS | |
| | | SGPAFS | | | | PEDTAVY | | | |
| | | | | | | YCAR | | | |
| 5 | | QVQLVESG | 562 | WFRQAPG | 563 | RFTVSRD | 564 | WGPG | 566 |
| | | GGLVQAGG | | KARDFVA | | NAKNTVH | | TQVT | |
| | | SLRLSCAA | | | | LQMNSLR | | VSS | |
| | | SGPAFS | | | | PEDTAVY | | | |
| | | | | | | YCAR | | | |
| 148 | | QVQLVESG | 562 | WFRQAPG | 563 | RFTVSRD | 564 | WGPG | 566 |
| | | GGLVQAGG | | KARDFVA | | NAKNTVH | | TQVT | |
| | | SLRLSCAA | | | | LQMNSLR | | VSS | |
| | | SGPAFS | | | | PEDTAVY | | | |
| | | | | | | YCAR | | | |
| 51 | | QVQLVESG | 562 | WFRQAPG | 563 | RFTVSRD | 564 | WGPG | 566 |
| | | GGLVQAGG | | KARDFVA | | NAKNTVH | | TQVT | |
| | | SLRLSCAA | | | | LQMNSLR | | VSS | |
| | | SGPAFS | | | | PEDTAVY | | | |
| | | | | | | YCAR | | | |
| 84 | | QVQLVESG | 562 | WFRQAPG | 563 | RFTVSRD | 564 | WGPG | 566 |
| | | GGLVQAGG | | KARDFVA | | NAKNTVH | | TQVT | |
| | | SLRLSCAA | | | | LQMNSLR | | VSS | |
| | | SGPAFS | | | | PEDTAVY | | | |
| | | | | | | YCAR | | | |
| 157 | ABTX3 | QVQLVESG | 562 | WFRQAPG | 567 | RFTVSRD | 568 | WGPG | 566 |
| | 20 | GGLVQAGG | | KAREFVA | | NAKMTVH | | TQVT | |
| | | SLRLSCAA | | | | LQMNSLR | | VSS | |
| | | SGPAFS | | | | PEDTAVY | | | |
| | | | | | | YCAR | | | |
| HCDR3 63 | | | | | | | | | |
| 660 | ABTX3 | QLQLVESG | 569 | WFRQAPG | 570 | RFTISRD | 571 | WGQG | 572 |
| | 22 | GGLVQPGG | | NQREFVA | | HTKNTVY | | TLVT | |
| | | SLRLSCAA | | | | LQMNSLK | | VSS | |
| | | SGSDFL | | | | VEDTAVY | | | |
| | | | | | | YCNT | | | |
| HCDR3 65 | | | | | | | | | |
| 155 | ABTX3 | QVQLQESG | 573 | WYRQAPG | 574 | RFTISRD | 575 | WGEG | 576 |
| | 23 | GGLVQAGG | | KQRELVA | | NAKNTVF | | TQVT | |
| | | SLRLSCAT | | | | LQMNSLK | | VSS | |
| | | SGITSS | | | | | | | |
| | | | | | | PEDTAEY | | | |
| | | | | | | YCHG | | | |
| HCDR3 66 | | | | | | | | | |
| 563 | ABTX3 | EVQLVESG | 577 | WVRQAPG | 579 | RFTISRD | 581 | RGQG | 583 |
| | 30 | GGLVQPGG | | KGLEWVS | | NAKKTAY | | TQVT | |
| | | SLRLSCAA | | | | LQMNSLK | | VSS | |
| | | SGFPFS | | | | AEDTAVY | | | |
| | | | | | | YCAT | | | |
| 500 | | QVQLVESG | 578 | WVRQAPG | 580 | RFTISRD | 582 | RGQG | 583 |
| | | GGLVQPGG | | KEVEWVS | | NAKNTVY | | TQVT | |
| | | SLRLSCAA | | | | LQMSNLK | | VSS | |
| | | SGFNFS | | | | AEDTAVY | | | |
| | | | | | | YCAT | | | |
| HCDR3 67 | | | | | | | | | |
| 550 | ABTX3 | QVQLVESG | 584 | WYRQAPG | 585 | RFIISRE | 586 | WGQG | 542 |
| | 24 | GGLVQPGG | | KEREFVA | | NAKTTVY | | TQVT | |
| | | SVRLSCAT | | | | LQMNGLK | | VSS | |
| | | SGSIFS | | | | PEDTAVY | | | |
| | | | | | | YCVI | | | |
| HCDR3 68 | | | | | | | | | |
| 647 | | EVQLVESG | 587 | WYRQAPG | 585 | RFTISRE | 589 | WGQG | 542 |
| | | GGLVQPGG | | KEREFVA | | NAKNTVY | | TQVT | |
| | | SLRLSCAA | | | | LQMNSLK | | VSS | |
| | | SGSVVS | | | | PEDTAVY | | | |
| | | | | | | YCVI | | | |
| 420 | ABTX3 | QVQLVESG | 588 | WYRQAPG | 585 | RFTISRE | 589 | WGQG | 542 |
| | 25 | GGLVQPGG | | KEREFVA | | NAKNTVY | | TQVT | |
| | | SLRLSCAA | | | | LQMNSLK | | VSS | |
| | | SGSDAS | | | | PEDTAVY | | | |
| | | | | | | YCVI | | | |
| HCDR3 60 | | | | | | | | | |
| 1065 | | QLQLVESG | 590 | WYRQAPG | 591 | RFTISRE | 592 | WGQG | 542 |
| | | GGLVQPGE | | KERELVA | | NAKNMVY | | TQVT | |
| | | SLRLSCAA | | | | LQMNSLK | | VSS | |
| | | SGFSFS | | | | LEDTAVY | | | |
| | | | | | | YCNV | | | |
| 1091 | ABTX3 | QLQLVESG | 590 | WYRQAPG | 591 | RFTISRD | 593 | WGQG | 542 |
| | 29 | GGLVQPGE | | KERELVA | | NVKNMVY | | TQVT | |
| | | SLRLSCAA | | | | LQMNSLK | | VSS | |
| | | SGFSFS | | | | LEDTAVY | | | |
| | | | | | | YCNV | | | |
| HCDR3 57 | | | | | | | | | |
| 1043 | ABTX3 | QLQLVESG | 594 | WYRQAPG | 595 | RFAISRD | 596 | WGQG | 542 |
| | 21 | GGLVQPGE | | KQREVVA | | NAKRTVY | | TQVT | |
| | | SLRLSCVV | | | | LQMNSLK | | VSS | |
| | | SGDIFS | | | | FEDTAVY | | | |
| | | | | | | YCNV | | | |
| HCDR3 58 | | | | | | | | | |
| 1050 | ABTX3 | QVQLVESG | 597 | WYRQAPG | 574 | RFTISRD | 598 | WGQG | 542 |
| | 28 | GGLVQPGE | | KQRELVA | | NAKRTVY | | TQVT | |
| | | SLRLSCVV | | | | LQMNSLK | | VSS | |
| | | SGDIFS | | | | FEDTAVY | | | |
| | | | | | | YCNF | | | |
| HCDR3 43 | | | | | | | | | |
| 917 | ABTX3 | QVQLVESG | 599 | WVRQAPG | 600 | RFTISRD | 601 | RGQG | 583 |
| | 19 | GGLVQPGG | | KRLEWVS | | NADNTLY | | TQVT | |
| | | SLRLSCAA | | | | LHMNNLK | | VSS | |
| | | SGFTFS | | | | PEDTAVY | | | |
| | | | | | | YCAN | | | |
| 928 | | QVQLVESG | 599 | WVRQAPG | 600 | RFTISRD | 601 | RGQG | 622 |
| | | GGLVQPGG | | KRLEWVS | | NADNTLY | | TQVT | |
| | | SLRLSCAA | | | | LHMNNLK | | VVS | |
| | | SGFTFS | | | | PEDTAVY | | | |
| | | | | | | YCAN | | | |
| 923 | | QVQLVESG | 599 | WVRQAPG | 600 | RFTISRD | 601 | RGQG | 583 |
| | | GGLVQPGG | | KRLEWVS | | NADNTLY | | TQVT | |
| | | SLRLSCAA | | | | LHMNNLK | | VSS | |
| | | SGFTFS | | | | PEDTAVY | | | |
| | | | | | | YCAN | | | |
| HCDR3 46 | | | | | | | | | |
| 834 | ABTX3 | QVQLVESG | 602 | WFRQAPG | 539 | RFTISRE | 603 | WGQG | 542 |
| | 27 | GGLVQPGG | | KEREFVA | | NAKNTVY | | TQVT | |
| | | SLRLSCVA | | | | LQMNTLK | | VSS | |
| | | SGGTFS | | | | LEDTAVY | | | |
| | | | | | | YCVS | | | |

[0258] In various embodiments, the FR1 of a VHH antibody of the disclosure contains the following amino acid sequence:

(SEQ ID NO: 604)
X₁X₂QLX₃ESGGX₄VQX₅GX₆SX₇RLX₈CX₉X₁₀SGX₁₁X₁₂X₁₃X₁₄,

wherein
[0259] X₁ is E or Q;
[0260] X₂ is L or V;
[0261] X₃ is V or Q;
[0262] X₄ is L or S;
[0263] X₅ is P or A;
[0264] X₆ is A, E, or G;
[0265] X₇ is L, R, or V;
[0266] X₈ is A or S;
[0267] X₉ is A or V;
[0268] X₁₀ is A, T, or V;
[0269] X₁₁ is A, D, F, G, I, P, R, or S;
[0270] X₁₂ is A, D, I, N, P, S, T, or V;
[0271] X₁₃ is A, F, null, S, or V; and
[0272] X₁₄ is I, L, null, or S.

[0273] In various embodiments, the FR2 of a VHH antibody of the disclosure contains the following amino acid sequence:

WX₁₅RX₁₆APGX₁₇X₁₈X₁₉X₂₀X₂₁VX₂₂ (SEQ ID NO: 605), wherein
[0274] X₁₅ is F, V, or Y;
[0275] X₁₆ is H or Q;
[0276] X₁₇ is E or K;
[0277] X₁₈ A, D, E, G, R, or Q;
[0278] X₁₉ is L or R;
[0279] X₂₀ is D or E;
[0280] X₂₁ is F, L, V, or W; and
[0281] X₂₂ is A or S.

[0282] In various embodiments, the FR3 of a VHH antibody of the disclosure contains the following amino acid sequence:

RFX₂₃X₂₄SRX₂₅X₂₆X₂₇X₂₈X₂₉X₃₀X₃₁X₃₂LX₃₃MX₃₄X₃₅LX₃₆X₃₇EDTAX₃₈YYCX₃₉X₄₀ (SEQ ID NO: 606), wherein
[0283] X₂₃ is A, I, or T;
[0284] X₂₄ is I or V;
[0285] X₂₅ is D, E, or V;
[0286] X₂₆ is H, I, or N;
[0287] X₂₇ is A or T;
[0288] X₂₈ is D or K;
[0289] X₂₉ is K, M, N, R, S, or T;
[0290] X₃₀ is A, M, or T;
[0291] X₃₁ is A, L, or V;
[0292] X₃₂ is F, H, N, or Y;
[0293] X₃₃ is H or Q;
[0294] X₃₄ is N or S;
[0295] X₃₅ is G, N, S, or T;
[0296] X₃₆ is K or R;
[0297] X₃₇ is A, F, L, P, or V;
[0298] X₃₈ is V or E;
[0299] X₃₉ is A, H, N, or V; and
[0300] X₄₀ is A, E, F, G, I, N, R, T, or V.

[0301] In various embodiments, the FR4 of a VHH antibody of the disclosure contains the following amino acid sequence:

X₄₀GX₄₁GTX₄₂VX₄₃VX₄₄S (SEQ ID NO: 607), wherein
[0302] X₄₀ is R or W;
[0303] X₄₁ is Q, E, or P;
[0304] X₄₂ is L or Q;
[0305] X₄₃ is S or T; and
[0306] X₄₄ is S or V.

[0307] The CDRs of the anti-CD5 VHH polypeptides described herein may vary in amino acid sequence length. It will be appreciated by one skilled in the art that number of amino acids that constitute a CDR is not necessarily precise. In some cases, an amino acid residue, or 2 or 3 amino acid residues, at one end or both ends of a given CDR may be considered as part of the CDR or as part of the neighboring FR region. The CDR regions of representative anti-CD5 VHH antibody polypeptides described herein are presented in Tables 1A and 1B. The anti-CD5 VHH antibodies described herein demonstrate the CDR diversity that is selected during affinity maturation of CD5 binding polypeptides in the same animal. Despite such CDR diversity, the CD5 binding VHHs generated as described herein show detectable binding to CD5. The anti-CD5 VHH polypeptides demonstrate significant binding to the CD5 antigen, despite some variation among the CDR sequences in the context of their framework regions.

[0308] In view of the representative anti-CD5 VHH amino acid sequences listed in Tables 1A-1C, it will be appreciated by one skilled in the art that individual VHH polypeptides, (e.g., of from about 105 to about 140 amino acids in length and comprising 3 CDRs and 4 FR regions), which comprise at least about or equal to 85%, or 88%, or greater identity in amino acid sequence bind to CD5 antigen. In an embodiment, at least about or equal to 85%, 86%, 87%, 88%, 89%, 90%, 91%, 92%, 93%, 94%, 95%, 96%, 97%, 98%, 99%, or 100% amino acid sequence identity is tolerated among the anti-CD5 VHHs without adversely affecting or eliminating binding of the VHH polypeptides to the CD5 antigen. In an embodiment, such amino acid sequence variation among the anti-CD5 VHH polypeptides is tolerated in the CDRs of the VHH polypeptides without adversely affecting binding of the VHHs to CD5. In a particular embodiment, the amino acid sequence variations between or among anti-CD5 VHHs encompass one or more conservative amino acid substitutions or changes in a VHH amino acid sequence. In an embodiment, the one or more conservative amino acid substitutions or changes in a VHH amino acid sequence occur in one or more CDR sequences of the VHH, in one or more FR sequences of the VHH, or in CDR and FR sequences of the VHH.

[0309] The three CDRs of the anti-CD5 VHH polypeptides are arranged or positioned in the context of four FR regions as follows: FR1-CDR1-FR2-CDR2-FR3-CDR3-FR4, in which FR1 to FR4 refer to the framework regions 1-4, respectively, and in which CDR1 to CDR3 refer to the complementarity determining regions 1-3, respectively. An alignment of anti-CD5 VHHs, all of which specifically bind to CD5 protein antigen, demonstrates the extensive similarities among the sequences of each of the FRs (FR1, FR2, FR3 and FR4) found in the different CD5-binding VHH polypeptides. Similar to the FRs in conventional antibody polypeptides, the respective FRs (FR1, FR2, FR3 and FR4) of the anti-CD5 VHH polypeptides described herein are highly similar in sequence among different CD5-binding VHHs that were generated. Accordingly, provided are anti-CD5 VHH polypeptides comprising CDR1-3, in the structural context of FR1-4, that bind to CD5 protein, or to suitable fragments of the CD5 protein, as well as polypeptides that comprise or consist essentially of one or more of the anti-CD5 VHHs and/or CD5 binding fragments thereof (e.g., a chimeric antigen receptor (CAR) polypeptide).

[0310] In addition, the FRs of the CD5-binding VHHs described herein are highly or essentially similar in sequence to the FRs of VHHs produced in camelid animals, such as alpacas, camels, llamas, and the like. As they provide structural and conformational support for the CDRs of VHH polypeptides, the FRs and the FR1, FR2, FR3 and FR4 regions among camelid VHH polypeptides generally share significant sequence identity. See, e.g., A. M. Vattekatte et al., March 2020, PeerJ., 6(8): e8408. DOI: 10.7717/peerj.8408 and L. S. Mitchell and L. J. Colwell, 2018, Proteins, 86(7): 697-706).

[0311] Table 1C presents the amino acid sequences of the four framework regions, i.e., FR1, FR2, FR3 and FR4, respectively, of representative anti-CD5 VHH polypeptides described herein.

[0312] In embodiments, in cases in which a FR (or CDR) amino acid residue in a VHH polypeptide may be one of several alternative amino acid residues, the alternative amino acid residues will frequently share similar characteristics or properties, e.g., hydrophobicity, polarity, and/or charge. A conservative replacement (also called a conservative substitution) is an amino acid replacement or substitution in a polypeptide or region thereof that changes a given amino acid residue to a different amino acid residue with similar biochemical properties, such as charge, hydrophobicity, and/or size. By way of non-limiting example, the below Table 2 presents amino acids and their 1-letter codes categorized into six main classes based on their structure and the general chemical characteristics of their side chains (R groups).

TABLE 2
Classes of amino acids based on structural and chemical characteristics
of their side chains. In embodiments, an amino acid within an FR
or CDR of a VHH antibody of the disclosure is substituted with another
amino acid from the same class indicated in Table 2.

| Amino Acids | Class |
|---|---|
| Glycine (G), Alanine (A), Valine (V), | Aliphatic |
| Leucine (L), Isoleucine (I) | |
| Serine (S), Cysteine (C), Selenocysteine (U), | Hydroxyl or sulfur/ |
| Threonine (T), Methionine (M) | selenium containing |
| Proline (P) | Cyclic |
| Phenylalanine (F), Tyrosine (Y), | Aromatic |
| Tryptophan (W) | |
| Histidine (H), Lysine (K), Arginine (R) | Basic |
| Aspartate (D), Glutamate (E), Asparagine | Acidic and amides |
| (N), Glutamine (Q) | thereof |

[0313] In an embodiment, amino acid sequence substitutions or changes in an anti-CD5 VHH polypeptide relative to another anti-CD5 VHH polypeptide comprise conservative amino acid substitutions or changes such that a given amino acid residue is substituted with or replaced by a different amino acid residue with similar biochemical properties, such as charge, hydrophobicity, and/or size. In an embodiment, sequence variation between or among anti-CD5 VHH polypeptides results from one or more conservative amino acid changes and account for the percent sequence variation, e.g., 85%, 86%, 87%, 88%, 90%, 91%, 92%, 93%, 94%, 95%, 96%, 97%, 98%, or 99% sequence variation.

[0314] In some embodiments, the VHHs as described herein are humanized using methods and techniques practiced by those having skill in the art. (See, e.g., U.S. Pat. Nos. 8,975,382 and 10,550,174, the contents of which are incorporated by reference herein).

[0315] The anti-CD5 VHH antibodies described herein have widespread application (e.g., as antigen binding domains of chimeric antigen receptor polypeptides). In embodiments, the disclosure provides polynucleotides that encode operably linked modular components that constitute the described anti-CD5 VHHs. In embodiments, the anti-CD5 VHHs are recombinantly produced. In embodiments, the anti-CD5 VHHs encompass the proteins (polypeptides) encoded by the polynucleotides. In embodiments, the polynucleotide is DNA, cDNA, RNA, mRNA, or the like. In an embodiment, the anti-CD5 VHHs may be humanized or codon-optimized using methods practiced by those having skill in the art.

[0316] Suitable methods of producing or isolating antibody fragments having the requisite binding specificity and affinity for binding to an epitope tag include for example, methods which select recombinant antibody from a library or by PCR (e.g., U.S. Pat. Nos. 5,455,030 and 7,745,587 each of which is incorporated by reference herein in its entirety).

[0317] Functional fragments of antibodies, including fragments of chimeric, humanized, primatized, veneered, or single chain antibodies, can also be produced. Functional fragments or portions of the foregoing antibodies include those which are reactive with the CD5 protein. For example, antibody fragments capable of binding to CD5 or a portion thereof, include, but not limited to, scFvs, Fabs, VHHs, Fv, Fab, Fab′ and F(ab′)₂. Such fragments can be produced by enzymatic cleavage or by recombinant techniques. For instance, papain or pepsin cleavage are used generate Fab or F(ab′)₂ antibody fragments, respectively. Antibody fragments are produced in a variety of truncated forms using antibody-encoding genes in which one or more stop codons has been introduced upstream of the natural stop site. For example, a chimeric gene encoding a F(ab′)₂ heavy chain peptide portion can be designed to include DNA sequences encoding the CH₁ peptide domain and hinge region of an immunoglobulin heavy chain.

### Lipid Nanoparticles

[0318] Lipid nanoparticles are spherical vesicles made of ionizable lipids, which are positively charged at low pH (enabling RNA complexation) and neutral at physiological pH (reducing potential toxic effects, as compared with positively charged lipids, such as liposomes) (see Nature Reviews Materials 6:99 (2021)). Owing to their size and properties, lipid nanoparticles are taken up by cells via endocytosis, and the ionizability of the lipids at low pH (likely) enables endosomal escape, which allows release of polypeptides or polynucleotides contained within the lipid nanoparticle to be released into the cytoplasm. In addition, lipid nanoparticles may contain a helper lipid to promote cell binding, cholesterol to fill the gaps between the lipids, and/or a polyethylene glycol (PEG) to reduce opsonization by serum proteins and reticuloendothelial clearance. The relative amounts of ionizable lipid, helper lipid, cholesterol and PEG substantially affect the efficacy of lipid nanoparticles, and need to be optimized for a given application and administration route. Moreover, lipid type, size and surface charge impact the behavior of lipid nanoparticles in vivo. Lipid nanoparticles may be used for the delivery of a polynucleotide to a cell.

[0319] It can be advantageous to conjugate a lipid nanoparticle to an antigen-binding polypeptide (e.g., the CD5-binding polypeptides provided herein) where the antigen-binding polypeptide binds an antigen on a target cell so as to target the lipid nanoparticle to the garget cell. For example, given that T cells express CD5 on their surface, lipid nanoparticles conjugated to the CD5-binding polypeptides of the disclosure may be used for targeted delivery of a polynucleotide contained within the lipid nanoparticle to a T cell in a subject. Methods are available to the skilled practitioner for conjugating a lipid nanoparticle to an antigen-binding polypeptide (see, e.g., Yaozhong, et al. “Nanobody™-based delivery systems for diagnosis and targeted tumor therapy,” Front Immunol 8:1442 (2017)).

[0320] Lipid nanoparticles include any one or more lipids. In some embodiments, the lipid nanoparticles (LNPs) include one or more cationic/ionizable, PEGylated, structural, or other lipids, such as phospholipids. In some embodiments, an LNP comprises a cationic lipid, a helper lipid, and a PEG-modified lipid. In some embodiments, an LNP comprises a cationic lipid, a helper lipid, a PEG-modified lipid, and sterol. Cationic lipids include both permanently charged and ionizable lipids. The ionizable lipids, for example, comprise ionizable lipids including a central amine moiety and at least one biodegradable group. The lipids described herein may be advantageously used in lipid nanoparticles and lipid nanoparticle formulations for the delivery of a therapeutic and/or prophylactic agent, such as a nucleic acid molecule, to a mammalian cell, tissue, or organ.

[0321] Suitable LNPs include, for example, lipids familiar to a skilled practitioner or any novel inventive lipids that are generated in the future. Exemplary lipids are described, for example, in the following PCT patent application publications: WO 2015/095340, WO 2020/150320, WO 2020/219876, WO 2021/021634, WO 2021/113365, WO 2022/060871, WO 2017/075531, and WO 2021/141969, and the PCT Application No.: PCT/US2021/64339; the contents of each of which are incorporated herein by reference in their entirety for all purposes.

### Helper Lipids

[0322] In some embodiments, an LNP comprises one or more helper lipids. Helper lipids include, but are not limited to, distearoylphosphatidylcholine (DSPC), dioleoylphosphatidylcholine (DOPC), dipalmitoylphosphatidylcholine (DPPC), dioleoylphosphatidylglycerol (DOPG), dipalmitoylphosphatidylglycerol (DPPG), dioleoylphosphatidylethanolamine (DOPE), palmitoyloleoylphosphatidylcholine (POPC), palmitoyloleoyl-phosphatidylethanolamine (POPE), dioleoyl-phosphatidylethanolamine 4-(N-maleimidomethyl)-cyclohexane-1-carboxylate (DOPE-mal), dipalmitoyl phosphatidyl ethanolamine (DPPE), dimyristoylphosphoethanolamine (DMPE), distearoyl-phosphatidyl-ethanolamine (DSPE), 16-O-monomethyl PE, 16-O-dimethyl PE, 18-l-trans PE, l-stearoyl-2-oleoyl-phosphatidyethanolamine (SOPE), or a mixture thereof.

### PEG-Modified Lipids

[0323] In some embodiments, an LNP comprises one or more PEG lipids. PEG lipids include PEG-modified phosphatidylethanolamine and phosphatidic acid, PEG-ceramide conjugates (e.g., PEG-CerC14 or PEG-CerC20), PEG-modified dialkylamines and PEG-modified 1,2-diacyloxypropan-3-amines. Such lipids are also referred to as PEGylated lipids. In some embodiments, a PEG lipid can be PEG-c-DOMG, PEG-DMG, PEG-DLPE, PEG-DMPE, PEG-DPPC, or a PEG-DSPE lipid.

[0324] In some embodiments, the PEG lipid includes, but are not limited to, 1,2-dimyristoyl-sn-glycerol methoxypoly ethylene glycol (PEG-DMG), 1,2-distearoyl-sn-glycero-3-phosphoethanolamine-N-[amino(polyethylene glycol)] (PEG-DSPE), PEG-disteryl glycerol (PEG-DSG), PEG-dipalmetoleyl, PEG-dioleyl, PEG-distearyl, PEG-diacylglycamide (PEG-DAG), PEG-dipalmitoyl phosphatidylethanolamine (PEG-DPPE), or PEG-1, 2-dimyristyloxlpropy 1-3-amine (PEG-c-DMA).

[0325] In some embodiments, the PEG lipid is selected from the group consisting of a PEG-modified phosphatidylethanolamine, a PEG-modified phosphatidic acid, a PEG-modified ceramide, a PEG-modified dialkylamine, a PEG-modified diacylglycerol, a PEG-modified dialkylglycerol, and mixtures thereof.

[0326] In some embodiments, the lipid moiety of the PEG lipids includes those having lengths of from about C₁₄ to about C₂₂, e.g., from about C₁₄ to about C₁₆. In some embodiments, a PEG moiety, for example an mPEG-NEb, has a size of about 1000, 2000, 5000, 10,000, 15,000 or 20,000 Daltons. In some embodiments, the PEG lipid is PEG2k-DMG.

[0327] In some embodiments, the lipid nanoparticles described herein can comprise a PEG lipid which is a non-diffusible PEG. Non-limiting examples of non-diffusible PEGs include PEG-DSG and PEG-DSPE. PEG lipids are known in the art, such as those described in U.S. Pat. No. 8,158,601 and International Publ. No. WO 2015/130584 A2, the disclosures of which are incorporated herein by reference in their entirety for all purposes.

[0328] In general, some of the other lipid components (e.g., PEG lipids) of various formulae, described herein may be synthesized as described International Patent Application No. PCT/US2016/000129, filed Dec. 10, 2016, entitled “Compositions and Methods for Delivery of Therapeutic Agents,” the disclosure of which is incorporated herein by reference in its entirety for all purposes.

[0329] The lipid component of a lipid nanoparticle or lipid nanoparticle formulation may include one or more molecules comprising polyethylene glycol, such as PEG or PEG-modified lipids. Such species may be alternately referred to as PEGylated lipids. A PEG lipid is a lipid modified with polyethylene glycol. A PEG lipid may be selected from the non-limiting group including PEG-modified phosphatidylethanolamines, PEG-modified phosphatidic acids, PEG-modified ceramides, PEG-modified dialkylamines, PEG-modified diacylglycerols, PEG-modified dialkylglycerols, and mixtures thereof. In some embodiments, a PEG lipid may be PEG-c-DOMG, PEG-DMG, PEG-DLPE, PEG-DMPE, PEG-DPPC, or a PEG-DSPE lipid.

### Sterols

[0330] In some embodiments, an LNP comprises one or more sterol-based lipids. In some embodiments, a sterol is a cholesterol, or a variant or derivative thereof. In some embodiments, a cholesterol is modified. In some embodiments, a cholesterol is an oxidized cholesterol. Exemplary sterols that are considered for use in the disclosed lipid nanoparticles include but are not limited to 25-hydroxycholesterol (25-OH), 20α-hydroxycholesterol (20α-OH), 27-hydroxycholesterol, 6-keto-5α-hydroxycholesterol, 7-ketocholesterol, 7β-hydroxycholesterol, 7α-hydroxycholesterol, 7β-25-dihydroxycholesterol, beta-sitosterol, stigmasterol, brassicasterol, campesterol, or combinations thereof. In some embodiments, a side-chain oxidized cholesterol can enhance cargo delivery relative to other cholesterol variants. In some embodiments, a cholesterol is an unmodified cholesterol. Other examples of suitable cholesterol-based lipids include, for example, DC-Choi (N,N-dimethyl-N-ethylcarboxamidocholesterol), 1,4-bis(3-N-oleylamino-propyl) piperazine (Gao, et al. Biochem. Biophys. Res. Comm. 179, 280 (1991); Wolf et al. BioTechniques 23, 139 (1997); U.S. Pat. No. 5,744,335, the disclosures of which are incorporated herein by reference in their entireties for all purposes), or ICE.

### Targeting Molecules

[0331] In some embodiments, an LNP comprises one or more targeting molecules. It should be understood that a targeting particle of the present disclosure may comprise at least one (e.g., two or more) targeting molecules that are the same as each other (e.g., targeting ligands) or different from each other (e.g., targeting ligands and targeting antibodies). In some embodiments, a targeting molecule is an anti-CD5 VHH antibody of the disclosure, or a CD5-binding fragment thereof.

### Targeting Particles

[0332] Compositions and methods of the disclosure involve targeting particles (also referred to as targeted particles). In various embodiments, a targeted particle is an LNPs (e.g., are capable of transporting molecules) of the disclosure, optionally with active agent encapsulated in or bound to (e.g., covalently or non-covalently conjugated to) the particle surface. Examples of particles of the present disclosure include, without limitation, liposomes and polymeric particles.

[0333] In various embodiments, a targeted particle of the disclosure (e.g., an LNP) contains an anti-CD5 VHH antibody of the disclosure. In some cases, the anti-CD5 VHH antibody is covalently linked to a PEG molecule of an LNP. In some cases the anti-CD5 VHH antibody is covalently linked to a PEG portion of a PEG-modified lipid of an LNP of the disclosure.

[0334] Non-limiting examples of cells that may be targeted by targeted particles of the disclosure include cells that express a CD5 polypeptide or a fragment thereof on their surface. In some cases, the cells targeted by the targeted particles of the disclosure are neoplastic cells (e.g., cells of a neoplasia, such as a B cell lymphoma or T cell lymphoma). The targeted cells may be T-cell acute lymphoblastic leukemia cells. In some embodiments, a targeted particle of the disclosure contains an anti-CD5 VHH antibody or CD5-binding fragment thereof conjugated to a surface thereof.

### Particle Conjugation

[0335] In some embodiments, particles comprise antibodies or antibody fragments on their surface (e.g., an anti-CD5 VHH antibody of the disclosure, or an antigen-binding fragment thereof). In some embodiments, the antibodies may be designed to bind to target cells without triggering their elimination by complement or other antibody effector mechanisms. This may be achieved either by using antibody fragments or antibodies with mutations that abrogate Fc receptor binding or other effector mechanisms.

[0336] These antibody and non-antibody based ligands may be conjugated (or attached or bound, as the terms are used interchangeably herein) to the particle surface covalently or non-covalently. The particles may be synthesized or modified post-synthesis to comprise one or more reactive groups on their exterior surface that can be used to conjugate the antibody and non-antibody based ligands. These particle reactive groups include without limitation thiol-reactive maleimide head groups, haloacetyl (e.g., iodoacetyl) groups, imidoester groups, N-hydroxysuccinimide esters, pyridyl disulfide groups, and the like. As an example, particles may be synthesized to include maleimide conjugated phospholipids such as, without limitation, DSPE-MaL-PEG2000. It will be understood that when surface modified in this manner, the particles are intended for use with ligands having complementary reactive groups (i.e., reactive groups that react with those of the particles).

[0337] Methods for conjugating ligands or receptors such as antibodies to particle surfaces are described by Kwong et al. Cancer Research, 2013, 73:1547-1558, the entire contents of which are incorporated by reference herein for all purposes. Other exemplary methods of conjugation can include a reversible conjugation, such that the delivery vehicle can be disassociated from the targeting domain upon exposure to certain conditions or chemical agents. In another embodiment, the conjugation is an irreversible conjugation, such that under normal conditions the delivery vehicle does not dissociate from the targeting domain.

[0338] In some embodiments, the conjugation comprises a covalent bond between an activated polymer conjugated lipid and the targeting domain. An activated polymer conjugated lipid is a molecule comprising a lipid portion and a polymer portion that has been activated via functionalization of a polymer conjugated lipid with a first coupling group. In one embodiment, the activated polymer conjugated lipid comprises a first coupling group capable of reacting with a second coupling group. In one embodiment, the activated polymer conjugated lipid is an activated pegylated lipid. In one embodiment, the first coupling group is bound to the lipid portion of the pegylated lipid. In another embodiment, the first coupling group is bound to the polyethylene glycol portion of the pegylated lipid. In one embodiment, the second functional group is covalently attached to the targeting domain.

[0339] The first coupling group and second coupling group can be any functional groups known to those of skill in the art to react together form a covalent bond, for example under mild reaction conditions or physiological conditions. In some embodiments, the first coupling group or second coupling group are selected from the group consisting of maleimides, N-hydroxysuccinimide (NHS) esters, carbodiimides, hydrazide, pentafluorophenyl (PFP) esters, phosphines, hydroxymethyl phosphines, psoralen, imidoesters, pyridyl disulfide, isocyanates, vinyl sulfones, alpha-haloacetyls, aryl azides, acyl azides, alkyl azides, diazirines, benzophenone, epoxides, carbonates, anhydrides, sulfonyl chlorides, cyclooctyne, aldehydes, and sulfhydryl groups. In some embodiments, the first coupling group or second coupling group is selected from the group consisting of free amines (—NH₂), free sulfhydryl groups (—SH), free hydroxide groups (—OH), carboxylates, hydrazides, and alkoxyamines. In some embodiments, the first coupling group is a functional group that is reactive toward sulfhydryl groups, such as maleimide, pyridyl disulfide, or a haloacetyl. In one embodiment, the first coupling group is a maleimide.

[0340] In one embodiment, the second coupling group is a sulfhydryl group. The sulfhydryl group can be installed on the targeting domain using any method known to those of skill in the art. In one embodiment, the sulfhydryl group is present on a free cysteine residue. In one embodiment, the sulfhydryl group is revealed via reduction of a disulfide on the targeting domain, such as through reaction with 2-mercaptoethylamine. In one embodiment, the sulfhydryl group is installed via a chemical reaction, such as the reaction between a free amine and 2-iminothilane or N-succinimidyl S-acetylthioacetate (SATA).

[0341] In some embodiments, the polymer conjugated lipid and targeting domain are functionalized with groups used in “click” chemistry. Bioorthogonal “click” chemistry comprises the reaction between a functional group with a 1,3-dipole, such as an azide, a nitrile oxide, a nitrone, an isocyanide, and the link, with an alkene or an alkyne dipolarophiles. Exemplary dipolarophiles include any strained cycloalkenes and cycloalkynes known to those of skill in the art, including, but not limited to, cyclooctynes, dibenzocyclooctynes, monofluorinated cyclcooctynes, difluorinated cyclooctynes, and biarylazacyclooctynone.

### Cargo

[0342] In some embodiments, a particle or LNP composition of the disclosure may contain a cargo, such as one or more nucleic acids (e.g., a polynucleotide encoding a chimeric antigen receptor, an mRNA molecule encoding a base editor of the disclosure, and/or a guide RNA molecule). In some embodiments, the cargo is or comprises one or more biologically active agents, such as an mRNA, guide RNA (gRNA), nucleic acid, RNA-guided DNA-binding agent, expression vector, template nucleic acid, antibody (e.g., monoclonal, chimeric, humanized, sdAb, and fragments thereof, etc.), cholesterol, hormone, peptide, protein, chemotherapeutic and other types of antineoplastic agent, low molecular weight drug, vitamin, co-factor, nucleoside, nucleotide, oligonucleotide, enzymatic nucleic acid, antisense nucleic acid, triplex forming oligonucleotide, antisense DNA or RNA composition, chimeric DNA: RNA composition, allozyme, aptamer, ribozyme, decoys and analogs thereof, plasmid and other types of vectors, and small nucleic acid molecule, RNAi agent, short interfering nucleic acid (siNA), short interfering RNA (siRNA), double-stranded RNA (dsRNA), micro-RNA (miRNA), short hairpin RNA (shRNA) and self-replicating RNA (e.g., an RNA molecule encoding a replicase enzyme activity and capable of directing its own replication or amplification in vivo) molecules, peptide nucleic acid (PNA), a locked nucleic acid ribonucleotide (LNA), morpholino nucleotide, threose nucleic acid (TNA), glycol nucleic acid (GNA), sisiRNA (small internally segmented interfering RNA), and iRNA (asymmetrical interfering RNA). The above list of biologically active agents is exemplary only, and is not intended to be limiting. Such compounds may be purified or partially purified, and may be naturally occurring or synthetic, and may be chemically modified.

[0343] Cargo delivered via an LNP composition may be an RNA, such as an mRNA molecule encoding a protein of interest. For example, in some embodiments, an mRNA for expressing a protein such as green fluorescent protein (GFP), an RNA-guided DNA-binding agent, or a Cas nuclease is described herein. LNP compositions that include a Cas nuclease mRNA, for example a Class 2 Cas nuclease mRNA that allows for expression in a cell of a Class 2 Cas nuclease such as a Cas9 or Cpfl protein are provided. Further, cargo may contain one or more guide RNAs or nucleic acids encoding guide RNAs. A template nucleic acid, e.g., for repair or recombination, may also be included in the composition or a template nucleic acid may be used in the methods described herein. In some embodiments, cargo comprises an mRNA that encodes a Streptococcus pyogenes Cas9, optionally and an S. pyogenes gRNA. In some embodiments, cargo comprises an mRNA that encodes a Neisseria meningitidis Cas9, optionally and an nme gRNA.

[0344] In some embodiments, the disclosed compositions, preparations, nanoparticles, and/or nanomaterials contain an mRNA encoding an RNA-guided DNA-binding agent, such as a Cas nuclease, and/or a base editor of the disclosure. In particular embodiments, the disclosed compositions, preparations, nanoparticles, and/or nanomaterials comprise an mRNA encoding a Class 2 Cas nuclease, such as S. pyogenes Cas9.

[0345] In some embodiments, cargo for an LNP composition includes at least one guide RNA containing a spacer sequence that mediates directing of a napDNAbp to a target DNA. gRNA may guide a Cas nuclease, Class 2 Cas nuclease, and/or base editor to a target sequence on a target nucleic acid molecule.

[0346] Target sequences for RNA-guided DNA binding proteins such as Cas proteins include both the positive and negative strands of genomic DNA (i.e., the sequence given and the sequence's reverse compliment), as a nucleic acid substrate for a Cas protein is a double stranded nucleic acid. Accordingly, where a gRNA spacer is said to be “complementary to a target sequence”, it is to be understood that the spacer may direct a guide RNA to bind to the reverse complement of a target sequence. Thus, in some embodiments, where the spacer binds the reverse complement of a target sequence, the spacer is identical to certain nucleotides of the target sequence (e.g., the target sequence not including the PAM) except for the substitution of U for T in the spacer sequence.

[0347] In some embodiments, an sgRNA is a “Cas9 sgRNA” capable of mediating RNA-guided DNA cleavage by a Cas9 protein. In some embodiments, a sgRNA is a “Cpfl sgRNA” capable of mediating RNA-guided DNA cleavage by a Cpfl protein. In some embodiments, a gRNA comprises a crRNA and tracr RNA sufficient for forming an active complex with a Cas9 protein and mediating RNA-guided DNA cleavage. In some embodiments, a gRNA comprises a crRNA sufficient for forming an active complex with a Cpfl protein and mediating RNA-guided DNA cleavage.

[0348] Certain embodiments of the disclosure also provide nucleic acids, e.g., expression cassettes, encoding a gRNA described herein.

[0349] Certain embodiments of the present disclosure also provide delivery of a base editor (e.g., an adenine base editors (“ABEs”), a cytidine base editor (“CBE”) or a cytidine adenine base editor (“CABE”)) using the LNPs compositions, preparations, nanoparticles, and/or nanomaterials described herein. Base editors and methods of their use are described herein and in, e.g., U.S. Pat. Nos. 10,113,163, 10,167,457 and 9,840,699, and U.S. Patent Publication No. 2021/0130805, the contents of each of which are hereby incorporated by reference in their entireties for all purposes.

### Editing of Target Genes

[0350] To edit a polynucleotide in a cell, cells within or collected from a subject are contacted with one or more guide RNAs and a nucleobase editor polypeptide comprising a nucleic acid programmable DNA binding protein (napDNAbp) and a cytidine deaminase or adenosine deaminase or comprising one or more deaminases with cytidine deaminase and/or adenosine deaminase activity (e.g., a “dual deaminase” which has cytidine and adenosine deaminase activity). Editing a polynucleotide in a cell may involve administering to a subject a lipid nanoparticle of the disclosure, where the lipid nanoparticle contains as a cargo a base editor system (e.g., an mRNA molecule encoding a base editor of the disclosure and a gRNA molecule). In some embodiments, cells to be edited are contacted with at least one nucleic acid, wherein the at least one nucleic acid encodes one or more guide RNAs and a nucleobase editor polypeptide comprising a nucleic acid programmable DNA binding protein (napDNAbp) and a cytidine deaminase. In some embodiments, the gRNA comprises nucleotide analogs. In some instances, the gRNA is added directly to a cell. These nucleotide analogs can inhibit degradation of the gRNA from cellular processes.

### Nucleobase Editors

[0351] Useful in the methods and compositions described herein are nucleobase editors that edit, modify or alter a target nucleotide sequence of a polynucleotide. Nucleobase editors described herein typically include a polynucleotide programmable nucleotide binding domain and a nucleobase editing domain (e.g., adenosine deaminase, cytidine deaminase, or a dual deaminase). A polynucleotide programmable nucleotide binding domain, when in conjunction with a bound guide polynucleotide (e.g., gRNA), can specifically bind to a target polynucleotide sequence and thereby localize the base editor to the target nucleic acid sequence desired to be edited.

### Polynucleotide Programmable Nucleotide Binding Domain

[0352] Polynucleotide programmable nucleotide binding domains bind polynucleotides (e.g., RNA, DNA). A polynucleotide programmable nucleotide binding domain of a base editor can itself comprise one or more domains (e.g., one or more nuclease domains). In some embodiments, the nuclease domain of a polynucleotide programmable nucleotide binding domain comprises an endonuclease or an exonuclease.

[0353] Disclosed herein are base editors comprising a polynucleotide programmable nucleotide binding domain comprising all or a portion (e.g., a functional portion) of a CRISPR protein (i.e., a base editor comprising as a domain all or a portion (e.g., a functional portion) of a CRISPR protein (e.g., a Cas protein), also referred to as a “CRISPR protein-derived domain” of the base editor). A CRISPR protein-derived domain incorporated into a base editor can be modified compared to a wild-type or natural version of the CRISPR protein. A CRISPR protein-derived domain can comprise one or more mutations, insertions, deletions, rearrangements and/or recombinations relative to a wild-type or natural version of the CRISPR protein.

[0354] Cas proteins that can be used herein include class 1 and class 2. Non-limiting examples of Cas proteins include Cas1, Cas1B, Cas2, Cas3, Cas4, Cas5, Cas5d, Cas5t, Cas5h, Cas5a, Cas6, Cas7, Cas8, Cas9 (also known as Csnl or Csx12), Cas10, Csy1, Csy2, Csy3, Csy4, Cse1, Cse2, Cse3, Cse4, Cse5e, Csc1, Csc2, Csa5, Csn1, Csn2, Csm1, Csm2, Csm3, Csm4, Csm5, Csm6, Cmr1, Cmr3, Cmr4, Cmr5, Cmr6, Csb1, Csb2, Csb3, Csx17, Csx14, Csx10, Csx16, CsaX, Csx3, Csx1, Csx1S, Csf1, Csf2, CsO, Csf4, Csd1, Csd2, Cst1, Cst2, Csh1, Csh2, Csa1, Csa2, Csa3, Csa4, Csa5, Cas12a/Cpf1, Cas12b/C2cl (e.g., SEQ ID NO: 232), Cas12c/C2c3, Cas12d/CasY, Cas12e/CasX, Cas12g, Cas12h, Cas12i, and Cas12j/CasΦ, CARF, DinG, Turbo Cas9 (i.e., an SpCas9 with the amino acid alterations Q844R, V842L, F846Y, L847M, and I852F), homologues thereof, or modified versions thereof. A CRISPR enzyme can direct cleavage of one or both strands at a target sequence, such as within a target sequence and/or within a complement of a target sequence. For example, a CRISPR enzyme can direct cleavage of one or both strands within about 1, 2, 3, 4, 5, 6, 7, 8, 9, 10, 15, 20, 25, 50, 100, 200, 500, or more base pairs from the first or last nucleotide of a target sequence.

[0355] A vector that encodes a CRISPR enzyme that is mutated to with respect to a corresponding wild-type enzyme such that the mutated CRISPR enzyme lacks the ability to cleave one or both strands of a target polynucleotide containing a target sequence can be used. A Cas protein (e.g., Cas9, Cas12) or a Cas domain (e.g., Cas9, Cas12) can refer to a polypeptide or domain with at least or at least about 50%, 60%, 70%, 80%, 90%, 91%, 92%, 93%, 94%, 95%, 96%, 97%, 98%, 99%, or 100% sequence identity and/or sequence homology to a wild-type exemplary Cas polypeptide or Cas domain. Cas (e.g., Cas9, Cas12) can refer to the wild-type or a modified form of the Cas protein that can comprise an amino acid change such as a deletion, insertion, substitution, variant, mutation, fusion, chimera, or any combination thereof. In some embodiments, a CRISPR protein-derived domain of a base editor can include all or a portion (e.g., a functional portion) of Cas9 from Corynebacterium ulcerans (NCBI Refs: NC_015683.1, NC_017317.1); Corynebacterium diphtheria (NCBI Refs: NC_016782.1, NC_016786.1); Spiroplasma syrphidicola (NCBI Ref: NC_021284.1); Prevotella intermedia (NCBI Ref: NC_017861.1); Spiroplasma taiwanense (NCBI Ref: NC_021846.1); Streptococcus iniae (NCBI Ref: NC_021314.1); Belliella baltica (NCBI Ref: NC_018010.1); Psychroflexus torquis (NCBI Ref: NC_018721.1); Streptococcus thermophilus (NCBI Ref: YP_820832.1); Listeria innocua (NCBI Ref: NP_472073.1); Campylobacter jejuni (NCBI Ref: YP_002344900.1); Neisseria meningitidis (NCBI Ref: YP_002342100.1), Streptococcus pyogenes, or Staphylococcus aureus.

[0356] Some aspects of the disclosure provide high fidelity Cas9 domains. High fidelity Cas9 domains are known in the art and described, for example, in Kleinstiver, B. P., et al. “High-fidelity CRISPR-Cas9 nucleases with no detectable genome-wide off-target effects.” Nature 529, 490-495 (2016); and Slaymaker, I. M., et al. “Rationally engineered Cas9 nucleases with improved specificity.” Science 351, 84-88 (2015); the entire contents of each of which are incorporated herein by reference. An Exemplary high fidelity Cas9 domain is provided in the Sequence Listing as SEQ ID NO: 233.

[0357] In some embodiments, any of the Cas9 fusion proteins or complexes provided herein comprise one or more of a D10A, N497X, a R661X, a Q695X, and/or a Q926X mutation, or a corresponding mutation in any of the amino acid sequences provided herein, wherein X is any amino acid.

[0358] Typically, Cas9 proteins, such as Cas9 from S. pyogenes (spCas9), require a “protospacer adjacent motif (PAM)” or PAM-like motif, which is a 2-6 base pair DNA sequence immediately following the DNA sequence targeted by the Cas9 nuclease in the CRISPR bacterial adaptive immune system. The presence of an NGG PAM sequence is required to bind a particular nucleic acid region, where the “N” in “NGG” is adenosine (A), thymidine (T), or cytosine (C), and the G is guanosine. In some embodiments, any of the fusion proteins or complexes provided herein may contain a Cas9 domain that is capable of binding a nucleotide sequence that does not contain a canonical (e.g., NGG) PAM sequence. Cas9 domains that bind to non-canonical PAM sequences have been described in the art and would be apparent to the skilled artisan. For example, Cas9 domains that bind non-canonical PAM sequences have been described in Kleinstiver, B. P., et al., “Engineered CRISPR-Cas9 nucleases with altered PAM specificities” Nature 523, 481-485 (2015); and Kleinstiver, B. P., et al., “Broadening the targeting range of Staphylococcus aureus CRISPR-Cas9 by modifying PAM recognition” Nature Biotechnology 33, 1293-1298 (2015); the entire contents of each are hereby incorporated by reference.

[0359] In some embodiments, the napDNAbp is a circular permutant (e.g., SEQ ID NO: 238).

[0360] In some embodiments, the polynucleotide programmable nucleotide binding domain comprises a nickase domain. Herein the term “nickase” refers to a polynucleotide programmable nucleotide binding domain comprising a nuclease domain that is capable of cleaving only one strand of the two strands in a duplexed nucleic acid molecule (e.g., DNA). For example, where a polynucleotide programmable nucleotide binding domain comprises a nickase domain derived from Cas9, the Cas9-derived nickase domain can include a D10A mutation and a histidine at position 840. In another example, a Cas9-derived nickase domain comprises an H840A mutation, while the amino acid residue at position 10 remains a D.

[0361] In some embodiments, a Cas9 nuclease has an inactive (e.g., an inactivated) DNA cleavage domain, that is, the Cas9 is a nickase, referred to as an “nCas9” protein (for “nickase” Cas9; SEQ ID NO: 201). The Cas9 nickase may be a Cas9 protein that is capable of cleaving only one strand of a duplexed nucleic acid molecule (e.g., a duplexed DNA molecule). In some embodiments the Cas9 nickase comprises an amino acid sequence that is at least 60%, at least 65%, at least 70%, at least 75%, at least 80%, at least 85%, at least 90%, at least 95%, at least 96%, at least 97%, at least 98%, at least 99%, or at least 99.5% identical to any one of the Cas9 nickases provided herein. Additional suitable Cas9 nickases will be apparent to those of skill in the art based on this disclosure and knowledge in the field and are within the scope of this disclosure.

[0362] Also provided herein are base editors comprising a polynucleotide programmable nucleotide binding domain which is catalytically dead (i.e., incapable of cleaving a target polynucleotide sequence). For example, in the case of a base editor comprising a Cas9 domain, the Cas9 can comprise both a D10A mutation and an H840A mutation. In further embodiments, a catalytically dead polynucleotide programmable nucleotide binding domain comprises a point mutation (e.g., D10A or H840A) as well as a deletion of all or a portion (e.g., a functional portion) of a nuclease domain. dCas9 domains are known in the art and described, for example, in Qi et al., “Repurposing CRISPR as an RNA-guided platform for sequence-specific control of gene expression.” Cell. 2013; 152 (5): 1173-83, the entire contents of which are incorporated herein by reference.

[0363] The term “protospacer adjacent motif (PAM)” or PAM-like motif refers to a 2-6 base pair DNA sequence immediately following the DNA sequence targeted by a nucleic acid programmable DNA binding protein. In some embodiments, the PAM can be a 5′ PAM (i.e., located upstream of the 5′ end of the protospacer). In other embodiments, the PAM can be a 3′ PAM (i.e., located downstream of the 5′ end of the protospacer). The PAM sequence can be any PAM sequence known in the art. Suitable PAM sequences include, but are not limited to, NGG, NGA, NGC, NGN, NGT, NGTT, NGCG, NGAG, NGAN, NGNG, NGCN, NGCG, NGTN, NNGRRT, NNNRRT, NNGRR (N), TTTV, TYCV, TYCV, TATV, NNNNGATT, NNAGAAW, or NAAAAC. Y is a pyrimidine; N is any nucleotide base; W is A or T.

[0364] A base editor provided herein can comprise a CRISPR protein-derived domain that is capable of binding a nucleotide sequence that contains a canonical or non-canonical protospacer adjacent motif (PAM) sequence.

[0365] In some embodiments, the PAM is an “NRN” PAM where the “N” in “NRN” is adenine (A), thymine (T), guanine (G), or cytosine (C), and the R is adenine (A) or guanine (G); or the PAM is an “NYN” PAM, wherein the “N” in NYN is adenine (A), thymine (T), guanine (G), or cytosine (C), and the Y is cytidine (C) or thymine (T), for example, as described in R. T. Walton et al., 2020, Science, 10.1126/science.aba8853 (2020), the entire contents of which are incorporated herein by reference.

[0366] Several PAM variants are described in Table 3 below.

TABLE 3
Cas9 proteins and corresponding PAM sequences.

| Variant | PAM |
|---|---|
| spCas9 | NGG |
| spCas9-VRQR | NGA |
| spCas9-VRER | NGCG |
| xCas9 (sp) | NGN |
| saCas9 | NNGRRT |
| saCas9-KKH | NNNRRT |
| spCas9-LRKIQK | NGTN |
| spCas9-LRVSQK | NGTN |
| spCas9-LRVSQL | NGTN |
| Cpf1 | 5′ (TTTV) |
| SpyMac | 5′-NAA-3′ |

N is A, C, T, or G; and V is A, C, or G.

[0367] In some embodiments, the PAM is NGC. In some embodiments, the NGC PAM is recognized by a Cas9 variant. In some embodiments, the Cas9 variant contains one or more amino acid substitutions selected from D1135V, G1218R, R1335Q, and T1337R (collectively termed VRQR) of spCas9 (SEQ ID No: 197), or a corresponding mutation in another Cas9. In some embodiments, the Cas9 variant contains one or more amino acid substitutions selected from D1135V, G1218R, R1335E, and T1337R (collectively termed VRER) of spCas9 (SEQ ID No: 197), or a corresponding mutation in another Cas9. In some embodiments, the Cas9 variant contains one or more amino acid substitutions selected from E782K, N968K, and R1015H (collectively termed KHH) of saCas9 (SEQ ID NO: 218).

[0368] In some cases, a Cas9 variant has specificity for the PAM 5′-NGC-3′. In some embodiments, a Cas9 variant includes one or more amino acid substitutions selected from D1135M, S1136Q, G1218K, E1219F, A1322R, D1332A, R1335E, and T1337K of spCas9 (SEQ ID No: 197), or a corresponding mutation in another Cas9. In some embodiments, a Cas9 variant includes one or more amino acid substitutions selected from D1135M, S1136Y, G1218K, E1219F, A1322R, D1332A, R1335E, and T1337K of spCas9 (SEQ ID No: 197), or a corresponding mutation in another Cas9. In some embodiments, the a Cas9 variant includes one or more amino acid substitutions selected from D1135L, S1136Y, G1218K, E1219F, A1322R, D1332A, R1335E, and T1337R of spCas9 (SEQ ID No: 197), or a corresponding mutation in another Cas9. In some embodiments, a Cas9 variant includes one or more amino acid substitutions selected from D1135M, S1136Y, G1218K, E1219F, A1322R, D1332A, R1335E, and T1337K of spCas9 (SEQ ID No: 197), or a corresponding mutation in another Cas9. In some embodiments, a Cas9 variant includes one or more amino acid substitutions selected from D1135L, S1136Y, G1218K, E1219F, A1283D, A1322R, D1332A, R1335E, and T1337K of spCas9 (SEQ ID No: 197), or a corresponding mutation in another Cas9. In some embodiments, a Cas9 variant includes one or more amino acid substitutions selected from D1135L, S1136Q, G1218K, E1219F, E1250K, A1283D, A1322R, D1332A, R1335E, and T1337K of spCas9 (SEQ ID No: 197), or a corresponding mutation in another Cas9. In some embodiments, a Cas9 variant includes one or more amino acid substitutions selected from D1135M, S1136Y, G1218K, E1219F, E1250K, A1283D, A1322R, D1332A, R1335E, and T1337R of spCas9 (SEQ ID No: 197), or a corresponding mutation in another Cas9. In some embodiments, a Cas9 variant includes one or more amino acid substitutions selected from R765A, Q768A, D1135L, S1136Y, G1218K, A1283D, E1219F, A1322R, D1332A, R1335E, and T1337K of spCas9 (SEQ ID No: 197), or a corresponding mutation in another Cas9. In some embodiments, any of the Cas9 proteins provided herein, including an SpCas9 comprises any one, two, three, four, five, six, seven, eight, nine, or ten of the following amino acid substitutions in a corresponding residue: R765A, Q768A, W1126R, R1359W, E1250K, A1239T, A1239V, A1283D, R1335D, D1135L, D1135M, D1135R, D1135W, S1136H, S1136Q, S1136Y, G1218D, G1218K, G1218R, G1218E, G1218L, E1219F, E1219K, E1219N, A1322A, A1322R, A1322K, D1332A, R1335V, T1337K, T1337T, D1332A, D1135V and T1337R.

[0369] In some embodiments, a CRISPR protein-derived domain of a base editor comprises all or a portion (e.g., a functional portion) of a Cas9 protein with a canonical PAM sequence (NGG). In other embodiments, a Cas9-derived domain of a base editor can employ a non-canonical PAM sequence. Such sequences have been described in the art and would be apparent to the skilled artisan. For example, Cas9 domains that bind non-canonical PAM sequences have been described in Kleinstiver, B. P., et al., “Engineered CRISPR-Cas9 nucleases with altered PAM specificities” Nature 523, 481-485 (2015); and Kleinstiver, B. P., et al., “Broadening the targeting range of Staphylococcus aureus CRISPR-Cas9 by modifying PAM recognition” Nature Biotechnology 33, 1293-1298 (2015); R. T. Walton et al. “Unconstrained genome targeting with near-PAMless engineered CRISPR-Cas9 variants” Science 10.1126/science.aba8853 (2020); Hu et al. “Evolved Cas9 variants with broad PAM compatibility and high DNA specificity,” Nature, 2018 Apr. 5, 556 (7699), 57-63; Miller et al., “Continuous evolution of SpCas9 variants compatible with non-G PAMs” Nat. Biotechnol., 2020 April; 38 (4): 471-481; the entire contents of each are hereby incorporated by reference.

Fusion Proteins or Complexes Comprising a NapDNAbp and a Cytidine Deaminase and/or Adenosine Deaminase

[0370] Some aspects of the disclosure provide fusion proteins or complexes comprising a Cas9 domain or other nucleic acid programmable DNA binding protein (e.g., Cas12) and one or more cytidine deaminase, adenosine deaminase, or cytidine adenosine deaminase domains. It should be appreciated that the Cas9 domain may be any of the Cas9 domains or Cas9 proteins (e.g., dCas9 or nCas9) provided herein. In some embodiments, any of the Cas9 domains or Cas9 proteins (e.g., dCas9 or nCas9) provided herein may be fused with any of the cytidine deaminases and/or adenosine deaminases provided herein. The domains of the base editors disclosed herein can be arranged in any order.

[0371] In some embodiments, the fusion proteins or complexes comprising a cytidine deaminase or adenosine deaminase and a napDNAbp (e.g., Cas9 or Cas12 domain) do not include a linker sequence. In some embodiments, a linker is present between the cytidine or adenosine deaminase and the napDNAbp. In some embodiments, cytidine or adenosine deaminase and the napDNAbp are fused via any of the linkers provided herein. For example, in some embodiments the cytidine or adenosine deaminase and the napDNAbp are fused via any of the linkers provided herein.

[0372] It should be appreciated that the fusion proteins or complexes of the present disclosure may comprise one or more additional features. For example, in some embodiments, the fusion protein or complex may comprise inhibitors, cytoplasmic localization sequences, export sequences, such as nuclear export sequences, or other localization sequences, as well as sequence tags that are useful for solubilization, purification, or detection of the fusion proteins or complexes. Suitable protein tags provided herein include, but are not limited to, biotin carboxylase carrier protein (BCCP) tags, myc-tags, calmodulin-tags, FLAG-tags, hemagglutinin (HA)-tags, polyhistidine tags, also referred to as histidine tags or His-tags, maltose binding protein (MBP)-tags, nus-tags, glutathione-S-transferase (GST)-tags, green fluorescent protein (GFP)-tags, thioredoxin-tags, S-tags, Softags (e.g., Softag 1, Softag 3), strep-tags, biotin ligase tags, FlAsH tags, V5 tags, and SBP-tags. Additional suitable sequences will be apparent to those of skill in the art. In some embodiments, the fusion protein or complex comprises one or more His tags.

[0373] Exemplary, yet nonlimiting, fusion proteins are described in International PCT Application Nos. PCT/US2017/045381, PCT/US2019/044935, and PCT/US2020/016288, each of which is incorporated herein by reference for its entirety.

Fusion Proteins or Complexes with Internal Insertions

[0374] Provided herein are fusion proteins or complexes comprising a heterologous polypeptide fused to a nucleic acid programmable nucleic acid binding protein, for example, a napDNAbp. The heterologous polypeptide can be fused to the napDNAbp at a C-terminal end of the napDNAbp, an N-terminal end of the napDNAbp, or inserted at an internal location of the napDNAbp. In some embodiments, the heterologous polypeptide is a deaminase (e.g., cytidine or adenosine deaminase) or a functional fragment thereof. For example, a fusion protein can comprise a deaminase flanked by an N-terminal fragment and a C-terminal fragment of a Cas9 or Cas12 (e.g., Cas12b/C2cl), polypeptide.

[0375] The deaminase can be a circular permutant deaminase. In some embodiments, the deaminase is a circular permutant TadA, circularly permutated at amino acid residue 116, 136, or 65 as numbered in a TadA reference sequence.

[0376] The fusion protein or complexes can comprise more than one deaminase. The fusion protein or complex can comprise, for example, 1, 2, 3, 4, 5 or more deaminases. The deaminases in a fusion protein or complex can be adenosine deaminases, cytidine deaminases, or a combination thereof.

[0377] In some embodiments, the napDNAbp in the fusion protein or complex contains a Cas9 polypeptide or a fragment thereof. The Cas9 polypeptide can be a variant Cas9 polypeptide. The Cas9 polypeptide can be a circularly permuted Cas9 protein.

[0378] The heterologous polypeptide (e.g., deaminase) can be inserted in the napDNAbp (e.g., Cas9 or Cas12 (e.g., Cas12b/C2cl)) at a suitable location, for example, such that the napDNAbp retains its ability to bind the target polynucleotide and a guide nucleic acid. A deaminase (e.g., adenosine deaminase, cytidine deaminase, or adenosine deaminase and cytidine deaminase (dual deaminase)) can be inserted into a napDNAbp without compromising function of the deaminase (e.g., base editing activity) or the napDNAbp (e.g., ability to bind to target nucleic acid and guide nucleic acid).

[0379] A fusion protein may comprise a linker between the deaminase and the napDNAbp polypeptide. The linker can be a peptide or a non-peptide linker. For example, the linker can be an XTEN, (GGGS)ₙ (SEQ ID NO: 246), SGGSSGGS (SEQ ID NO: 330), (GGGGS)ₙ (SEQ ID NO: 247), (G)ₙ, (EAAAK)n (SEQ ID NO: 248), (GGS)ₙ, SGSETPGTSESATPES (SEQ ID NO: 249). In other embodiments, the amino acid sequence of the linker is GGSGGS (SEQ ID NO: 250) or GSSGSETPGTSESATPESSG (SEQ ID NO: 251). In other embodiments, the linker is a rigid linker. In other embodiments of the above aspects, the linker is encoded by

```
  (SEQ ID NO: 252)
GGAGGCTCTGGAGGAAGC
or
  (SEQ ID NO: 253)
GGCTCTTCTGGATCTGAAACACCTGGCACAAGCGAGAGCGCCACCCCT
GAGAGCTCTGGC.
```

[0380] In some embodiments, the napDNAbp in the fusion protein or complex is a Cas12 polypeptide, e.g., Cas12b/C2cl, or a functional fragment thereof capable of associating with a nucleic acid (e.g., a gRNA) that guides the Cas12 to a specific nucleic acid sequence.

[0381] In other embodiments, the fusion protein or complex contains a nuclear localization signal (e.g., a bipartite nuclear localization signal). In other embodiments, the amino acid sequence of the nuclear localization signal is MAPKKKRKVGIHGVPAA (SEQ ID NO: 261). In other embodiments of the above aspects, the nuclear localization signal is encoded by the following sequence:

(SEQ ID NO: 262)
ATGGCCCCAAAGAAGAAGCGGAAGGTCGGTATCCACGGAGTCCCAGCA
GCC.

[0382] In other embodiments, the Cas12b polypeptide contains a mutation that silences the catalytic activity of a RuvC domain. In other embodiments, the Cas12b polypeptide contains D574A, D829A and/or D952A mutations.

[0383] In some embodiments, the fusion protein or complex comprises a napDNAbp domain (e.g., Cas12-derived domain) with an internally fused nucleobase editing domain (e.g., all or a portion (e.g., a functional portion) of a deaminase domain, e.g., an adenosine deaminase domain). In some embodiments, the napDNAbp is a Cas12b.

[0384] In some embodiments, the base editing system described herein is an ABE with TadA inserted into a Cas9. Polypeptide sequences of relevant ABEs with TadA inserted into a Cas9 are provided in the attached Sequence Listing as SEQ ID NOs: 263-308.

[0385] Exemplary, yet nonlimiting, fusion proteins are described in International PCT Application Nos. PCT/US2020/016285 and U.S. Provisional Application Nos. 62/852,228 and 62/852,224, the contents of which are incorporated by reference herein in their entireties.

### A to G Editing

[0386] In some embodiments, a base editor described herein comprises an adenosine deaminase domain. Such an adenosine deaminase domain of a base editor can facilitate the editing of an adenine (A) nucleobase to a guanine (G) nucleobase by deaminating the A to form inosine (I), which exhibits base pairing properties of G. In some embodiments, an A-to-G base editor further comprises an inhibitor of inosine base excision repair, for example, a uracil glycosylase inhibitor (UGI) domain or a catalytically inactive inosine specific nuclease. Without wishing to be bound by any particular theory, the UGI domain or catalytically inactive inosine specific nuclease can inhibit or prevent base excision repair of a deaminated adenosine residue (e.g., inosine), which can improve the activity or efficiency of the base editor.

[0387] A base editor comprising an adenosine deaminase can act on any polynucleotide, including DNA, RNA and DNA-RNA hybrids. In an embodiment an adenosine deaminase domain of a base editor comprises all or a portion (e.g., a functional portion) of an ADAT comprising one or more mutations which permit the ADAT to deaminate a target A in DNA. For example, the base editor can comprise all or a portion (e.g., a functional portion) of an ADAT from Escherichia coli (EcTadA) comprising one or more of the following mutations: D108N, A106V, D147Y, E155V, L84F, H123Y, I156F, or a corresponding mutation in another adenosine deaminase. Exemplary ADAT homolog polypeptide sequences are provided in the Sequence Listing as SEQ ID NOs: 1 and 309-315.

[0388] The adenosine deaminase can be derived from any suitable organism (e.g., E. coli). In some embodiments, the adenosine deaminase is from Escherichia coli, Staphylococcus aureus, Salmonella typhi, Shewanella putrefaciens, Haemophilus influenzae, Caulobacter crescentus, or Bacillus subtilis. In some embodiments, the adenine deaminase is a naturally-occurring adenosine deaminase that includes one or more mutations corresponding to any of the mutations provided herein (e.g., mutations in ecTadA). The corresponding residue in any homologous protein can be identified by e.g., sequence alignment and determination of homologous residues. The mutations in any naturally-occurring adenosine deaminase (e.g., having homology to ecTadA) that correspond to any of the mutations described herein (e.g., any of the mutations identified in ecTadA) can be generated accordingly.

[0389] In some embodiments, the adenosine deaminase comprises an amino acid sequence that is at least 60%, at least 65%, at least 70%, at least 75%, at least 80%, at least 85%, at least 90%, at least 95%, at least 96%, at least 97%, at least 98%, at least 99%, or at least 99.5% identical to any one of the amino acid sequences set forth in any of the adenosine deaminases provided herein. It should be appreciated that adenosine deaminases provided herein may include one or more mutations (e.g., any of the mutations provided herein). The disclosure provides any deaminase domains with a certain percent identify plus any of the mutations or combinations thereof described herein. In some embodiments, the adenosine deaminase comprises an amino acid sequence that has 1, 2, 3, 4, 5, 6, 7, 8, 9, 10, 11, 12, 13, 14, 15, 16, 17, 18, 19, 20, 21, 22, 21, 24, 25, 26, 27, 28, 29, 30, 31, 32, 33, 34, 35, 36, 37, 38, 39, 40, 41, 42, 43, 44, 45, 46, 47, 48, 49, 50, or more mutations compared to a reference sequence, or any of the adenosine deaminases provided herein.

[0390] It should be appreciated that any of the mutations provided herein (e.g., based on a TadA reference sequence, such as TadA*7.10 (SEQ ID NO: 1)) can be introduced into other adenosine deaminases, such as E. coli TadA (ecTadA), S. aureus TadA (saTadA), or other adenosine deaminases (e.g., bacterial adenosine deaminases). In some embodiments, the TadA reference sequence is TadA*7.10 (SEQ ID NO: 1). It would be apparent to the skilled artisan that additional deaminases may similarly be aligned to identify homologous amino acid residues that can be mutated as provided herein. Thus, any of the mutations identified in a TadA reference sequence can be made in other adenosine deaminases (e.g., ecTada) that have homologous amino acid residues. It should also be appreciated that any of the mutations provided herein can be made individually or in any combination in a TadA reference sequence or another adenosine deaminase.

[0391] In some embodiments, the adenosine deaminase comprises an alteration or set of alterations selected from those listed in Tables 5A-5E below:

TABLE 5A
Adenosine Deaminase Variants. Residue positions in the E. coli TadA variant (TadA*) are indicated.

| | 23 | 26 | 36 | 37 | 48 | 49 | 51 | 72 | 84 | 87 | 106 | 108 | 123 | 125 | 142 | 146 | 147 | 152 | 155 | 156 | 157 | 161 |
|---|---|---|---|---|---|---|---|---|---|---|---|---|---|---|---|---|---|---|---|---|---|---|
| TadA*0.1 | W | R | H | N | P | | R | N | L | S | A | D | H | G | A | S | D | R | E | I | K | K |
| TadA*0.2 | W | R | H | N | P | | R | N | L | S | A | D | H | G | A | S | D | R | E | I | K | K |
| TadA*1.1 | W | R | H | N | P | | R | N | L | S | A | N | H | G | A | S | D | R | E | I | K | K |
| TadA*1.2 | W | R | H | N | P | | R | N | L | S | V | N | H | G | A | S | D | R | E | I | K | K |
| TadA*2.1 | W | R | H | N | P | | R | N | L | S | V | N | H | G | A | S | Y | R | V | I | K | K |
| TadA*2.2 | W | R | H | N | P | | R | N | L | S | V | N | H | G | A | S | Y | R | V | I | K | K |
| TadA*2.3 | W | R | H | N | P | | R | N | L | S | V | N | H | G | A | S | Y | R | V | I | K | K |
| TadA*2.4 | W | R | H | N | P | | R | N | L | S | V | N | H | G | A | S | Y | R | V | I | K | K |
| TadA*2.5 | W | R | H | N | P | | R | N | L | S | V | N | H | G | A | S | Y | R | V | I | K | K |
| TadA*2.6 | W | R | H | N | P | | R | N | L | S | V | N | H | G | A | S | Y | R | V | I | K | K |
| TadA*2.7 | W | R | H | N | P | | R | N | L | S | V | N | H | G | A | S | Y | R | V | I | K | K |
| TadA*2.8 | W | R | H | N | P | | R | N | L | S | V | N | H | G | A | S | Y | R | V | I | K | K |
| TadA*2.9 | W | R | H | N | P | | R | N | L | S | V | N | H | G | A | S | Y | R | V | I | K | K |
| TadA*2.10 | W | R | H | N | P | | R | N | L | S | V | N | H | G | A | S | Y | R | V | I | K | K |
| TadA*2.11 | W | R | H | N | P | | R | N | L | S | V | N | H | G | A | S | Y | R | V | I | K | K |
| TadA*2.12 | W | R | H | N | P | | R | N | L | S | V | N | H | G | A | S | Y | R | V | I | K | K |
| TadA*3.1 | W | R | H | N | P | | R | N | F | S | V | N | Y | G | A | S | Y | R | V | F | K | K |
| TadA*3.2 | W | R | H | N | P | | R | N | F | S | V | N | Y | G | A | S | Y | R | V | F | K | K |
| TadA*3.3 | W | R | H | N | P | | R | N | F | S | V | N | Y | G | A | S | Y | R | V | F | K | K |
| TadA*3.4 | W | R | H | N | P | | R | N | F | S | V | N | Y | G | A | S | Y | R | V | F | K | K |
| TadA*3.5 | W | R | H | N | P | | R | N | F | S | V | N | Y | G | A | S | Y | R | V | F | K | K |
| TadA*3.6 | W | R | H | N | P | | R | N | F | S | V | N | Y | G | A | S | Y | R | V | F | K | K |
| TadA*3.7 | W | R | H | N | P | | R | N | F | S | V | N | Y | G | A | S | Y | R | V | F | K | K |
| TadA*3.8 | W | R | H | N | P | | R | N | F | S | V | N | Y | G | A | S | Y | R | V | F | K | K |
| TadA*4.1 | W | R | H | N | P | | R | N | L | S | V | N | H | G | N | S | Y | R | V | I | K | K |
| TadA*4.2 | W | G | H | N | P | | R | N | L | S | V | N | H | G | N | S | Y | R | V | I | K | K |
| TadA*4.3 | W | R | H | N | P | | R | N | F | S | V | N | Y | G | N | S | Y | R | V | F | K | K |
| TadA*5.1 | W | R | L | N | P | | L | N | F | S | V | N | Y | G | A | C | Y | R | V | F | N | K |
| TadA*5.2 | W | R | H | S | P | | R | N | F | S | V | N | Y | G | A | S | Y | R | V | F | K | T |
| TadA*5.3 | W | R | L | N | P | | L | N | I | S | V | N | Y | G | A | C | Y | R | V | F | N | K |
| TadA*5.4 | W | R | H | S | P | | R | N | F | S | V | N | Y | G | A | S | Y | R | V | F | K | T |
| TadA*5.5 | W | R | L | N | P | | L | N | F | S | V | N | Y | G | A | C | Y | R | V | F | N | K |
| TadA*5.6 | W | R | L | N | P | | L | N | F | S | V | N | Y | G | A | C | Y | R | V | F | N | K |
| TadA*5.7 | W | R | L | N | P | | L | N | F | S | V | N | Y | G | A | C | Y | R | V | F | N | K |
| TadA*5.8 | W | R | L | N | P | | L | N | F | S | V | N | Y | G | A | C | Y | R | V | F | N | K |
| TadA*5.9 | W | R | L | N | P | | L | N | F | S | V | N | Y | G | A | C | Y | R | V | F | N | K |
| TadA*5.10 | W | R | L | N | P | | L | N | F | S | V | N | Y | G | A | C | Y | R | V | F | N | K |
| TadA*5.11 | W | R | L | N | P | | L | N | F | S | V | N | Y | G | A | C | Y | R | V | F | N | K |
| TadA*5.12 | W | R | L | N | P | | L | N | F | S | V | N | Y | G | A | C | Y | R | V | F | N | K |
| TadA*5.13 | W | R | H | N | P | | L | D | F | S | V | N | Y | A | A | S | Y | R | V | F | K | K |
| TadA*5.14 | W | R | H | N | S | | L | N | F | C | V | N | Y | G | A | S | Y | R | V | F | K | K |
| TadA*6.1 | W | R | H | N | S | | L | N | F | S | V | N | Y | G | N | S | Y | R | V | F | K | K |
| TadA*6.2 | W | R | H | N | T | V | L | N | F | S | V | N | Y | G | N | S | Y | R | V | F | N | K |
| TadA*6.3 | W | R | L | N | S | | L | N | F | S | V | N | Y | G | A | C | Y | R | V | F | N | K |
| TadA*6.4 | W | R | L | N | S | | L | N | F | S | V | N | Y | G | N | C | Y | R | V | F | N | K |
| TadA*6.5 | W | R | L | N | T | V | L | N | F | S | V | N | Y | G | A | C | Y | R | V | F | N | K |
| TadA*6.6 | W | R | L | N | T | V | L | N | F | S | V | N | Y | G | N | C | Y | R | V | F | N | K |
| TadA*7.1 | W | R | L | N | A | | L | N | F | S | V | N | Y | G | A | C | Y | R | V | F | N | K |
| TadA*7.2 | W | R | L | N | A | | L | N | F | S | V | N | Y | G | N | C | Y | R | V | F | N | K |
| TadA*7.3 | L | R | L | N | A | | L | N | F | S | V | N | Y | G | A | C | Y | R | V | F | N | K |
| TadA*7.4 | R | R | L | N | A | | L | N | F | S | V | N | Y | G | A | C | Y | R | V | F | N | K |
| TadA*7.5 | W | R | L | N | A | | L | N | F | S | V | N | Y | G | A | C | Y | H | V | F | N | K |
| TadA*7.6 | W | R | L | N | A | | L | N | I | S | V | N | Y | G | A | C | Y | P | V | F | N | K |
| TadA*7.7 | L | R | L | N | A | | L | N | F | S | V | N | Y | G | A | C | Y | P | V | F | N | K |
| TadA*7.8 | L | R | L | N | A | | L | N | F | S | V | N | Y | G | N | C | Y | R | V | F | N | K |
| TadA*7.9 | L | R | L | N | A | | L | N | F | S | V | N | Y | G | N | C | Y | P | V | F | N | K |
| TadA*7.10 | R | R | L | N | A | | L | N | F | S | V | N | Y | G | A | C | Y | P | V | F | N | K |

TABLE 5B
TadA*8 Adenosine Deaminase Variants. Residue positions in the E. coli TadA variant
(TadA*) are indicated. Alterations are referenced to TadA*7.10 (first row).

| | 23 | 36 | 48 | 51 | 76 | 82 | 84 | 106 | 108 | 123 | 146 | 147 | 152 | 154 | 155 | 156 | 157 | 166 |
|---|---|---|---|---|---|---|---|---|---|---|---|---|---|---|---|---|---|---|
| TadA*7.10 | R | L | A | L | I | V | F | V | N | Y | C | Y | P | Q | V | F | N | T |
| TadA*8.1 | | | | | | | | | | | | T | | | | | | |
| TadA*8.2 | | | | | | | | | | | | R | | | | | | |
| TadA*8.3 | | | | | | | | | | | | | | S | | | | |
| TadA*8.4 | | | | | | | | | | H | | | | | | | | |
| TadA*8.5 | | | | | | S | | | | | | | | | | | | |
| TadA*8.6 | | | | | | | | | | | | | | | | | | R |
| TadA*8.7 | | | | | | | | | | | | | | R | | | | |
| TadA*8.8 | | | | | | | | | | H | | R | | R | | | | |
| TadA*8.9 | | | | | Y | | | | | | | R | | R | | | | |
| TadA*8.10 | | | | | | | | | | | | R | | R | | | | R |
| TadA*8.11 | | | | | | | | | | | | T | | R | | | | |
| TadA*8.12 | | | | | | | | | | | | T | | S | | | | |
| TadA*8.13 | | | | | Y | | | | | H | | R | | R | | | | |
| TadA*8.14 | | | | | Y | S | | | | | | | | | | | | |
| TadA*8.15 | | | | | | S | | | | | | R | | | | | | |
| TadA*8.16 | | | | | | S | | | | H | | R | | | | | | |
| TadA*8.17 | | | | | | S | | | | | | | | R | | | | |
| TadA*8.18 | | | | | | S | | | | H | | | | R | | | | |
| TadA*8.19 | | | | | | S | | | | H | | R | | R | | | | |
| TadA*8.20 | | | | | Y | S | | | | H | | R | | R | | | | |
| TadA*8.21 | | | | | | | | | | | | R | | S | | | | |
| TadA*8.22 | | | | | | S | | | | | | | | S | | | | |
| TadA*8.23 | | | | | | S | | | | H | | | | | | | | |
| TadA*8.24 | | | | | | S | | | | H | | T | | | | | | |

TABLE 5C
TadA*9 Adenosine Deaminase Variants. Alterations are referenced
to TadA*7.10. Additional details of TadA*9 adenosine
deaminases are described in International PCT Application
No. PCT/US2020/049975, which is incorporated herein by
reference in its entirety for all purposes.

| TadA*9 | |
|---|---|
| Description | Alterations |
| TadA*9.1 | E25F, V82S, Y123H, T133K, Y147R, Q154R |
| TadA*9.2 | E25F, V82S, Y123H, Y147R, Q154R |
| TadA*9.3 | V82S, Y123H, P124W, Y147R, Q154R |
| TadA*9.4 | L51W, V82S, Y123H, C146R, Y147R, Q154R |
| TadA*9.5 | P54C, V82S, Y123H, Y147R, Q154R |
| TadA*9.6 | Y73S, V82S, Y123H, Y147R, Q154R |
| TadA*9.7 | N38G, V82T, Y123H, Y147R, Q154R |
| TadA*9.8 | R23H, V82S, Y123H, Y147R, Q154R |
| TadA*9.9 | R21N, V82S, Y123H, Y147R, Q154R |
| TadA*9.10 | V82S, Y123H, Y147R, Q154R, A158K |
| TadA*9.11 | N72K, V82S, Y123H, D139L, Y147R, Q154R, |
| TadA*9.12 | E25F, V82S, Y123H, D139M, Y147R, Q154R |
| TadA*9.13 | M70V, V82S, M94V, Y123H, Y147R, Q154R |
| TadA*9.14 | Q71M, V82S, Y123H, Y147R, Q154R |
| TadA*9.15 | E25F, V82S, Y123H, T133K, Y147R, Q154R |
| TadA*9.16 | E25F, V82S, Y123H, Y147R, Q154R |
| TadA*9.17 | V82S, Y123H, P124W, Y147R, Q154R |
| TadA*9.18 | L51W, V82S, Y123H, C146R, Y147R, Q154R |
| TadA*9.19 | P54C, V82S, Y123H, Y147R, Q154R |
| TadA*9.2 | Y73S, V82S, Y123H, Y147R, Q154R |
| TadA*9.21 | N38G, V82T, Y123H, Y147R, Q154R |
| TadA*9.22 | R23H, V82S, Y123H, Y147R, Q154R |
| TadA*9.23 | R21N, V82S, Y123H, Y147R, Q154R |
| TadA*9.24 | V82S, Y123H, Y147R, Q154R, A158K |
| TadA*9.25 | N72K, V82S, Y123H, D139L, Y147R, Q154R, |
| TadA*9.26 | E25F, V82S, Y123H, D139M, Y147R, Q154R |
| TadA*9.27 | M70V, V82S, M94V, Y123H, Y147R, Q154R |
| TadA*9.28 | Q71M, V82S, Y123H, Y147R, Q154R |
| TadA*9.29 | E25F, I76Y, V82S, Y123H, Y147R, Q154R |
| TadA*9.30 | I76Y, V82T, Y123H, Y147R, Q154R |
| TadA*9.31 | N38G, I76Y, V82S, Y123H, Y147R, Q154R |
| TadA*9.32 | N38G, I76Y, V82T, Y123H, Y147R, Q154R |
| TadA*9.33 | R23H, I76Y, V82S, Y123H, Y147R, Q154R |
| TadA*9.34 | P54C, I76Y, V82S, Y123H, Y147R, Q154R |
| TadA*9.35 | R21N, I76Y, V82S, Y123H, Y147R, Q154R |
| TadA*9.36 | I76Y, V82S, Y123H, D138M, Y147R, Q154R |
| TadA*9.37 | Y72S, I76Y, V82S, Y123H, Y147R, Q154R |
| TadA*9.38 | E25F, I76Y, V82S, Y123H, Y147R, Q154R |
| TadA*9.39 | I76Y, V82T, Y123H, Y147R, Q154R |
| TadA*9.40 | N38G, I76Y, V82S, Y123H, Y147R, Q154R |
| TadA*9.41 | N38G, I76Y, V82T, Y123H, Y147R, Q154R |
| TadA*9.42 | R23H, I76Y, V82S, Y123H, Y147R, Q154R |
| TadA*9.43 | P54C, I76Y, V82S, Y123H, Y147R, Q154R |
| TadA*9.44 | R21N, I76Y, V82S, Y123H, Y147R, Q154R |
| TadA*9.45 | I76Y, V82S, Y123H, D138M, Y147R, Q154R |
| TadA*9.46 | Y72S, I76Y, V82S, Y123H, Y147R, Q154R |
| TadA*9.47 | N72K, V82S, Y123H, Y147R, Q154R |
| TadA*9.48 | Q71M, V82S, Y123H, Y147R, Q154R |
| TadA*9.49 | M70V, V82S, M94V, Y123H, Y147R, Q154R |
| TadA*9.50 | V82S, Y123H, T133K, Y147R, Q154R |
| TadA*9.51 | V82S, Y123H, T133K, Y147R, Q154R, A158K |
| TadA*9.52 | M70V, Q71M, N72K, V82S, Y123H, Y147R, Q154R |
| TadA*9.53 | N72K, V82S, Y123H, Y147R, Q154R |
| TadA*9.54 | Q71M, V82S, Y123H, Y147R, Q154R |
| TadA*9.55 | M70V, V82S, M94V, Y123H, Y147R, Q154R |
| TadA*9.56 | V82S, Y123H, T133K, Y147R, Q154R |
| TadA*9.57 | V82S, Y123H, T133K, Y147R, Q154R, A158K |
| TadA*9.58 | M70V, Q71M, N72K, V82S, Y123H, Y147R, Q154R |

[0392] In some embodiments, the adenosine deaminase comprises a TadA*8.20 adenosine deaminase variant further comprising an F149Y amino acid alteration. In some embodiments, the adenosine deaminase comprises a TadA*8.20 adenosine deaminase variant further comprising the amino acid alterations R147D, F149Y, T166I, and D167N (TadA*8.10+). In some embodiments, the adenosine deaminase comprises a TadA*8.20 adenosine deaminase variant further comprising the amino acid alterations S82T and F149Y (TadA*9v1). In some embodiments, the adenosine deaminase comprises a TadA*8.20 adenosine deaminase variant further comprising the amino acid alterations Y147D, F149Y, T166I, D167N and S82T (TadA*9v2).

[0393] In some embodiments, the adenosine deaminase comprises one or more of M1I, M1S, S2A, S2E, S2H, S2R, S2L, E3L, V4D, V4E, V4M, V4K, V4S, V4T, V4A, E5K, F6S, F6G, F6H, F6Y, F6I, F6E, S7K, H8E, H8Y, H8H, H8Q, H8E, H8G, H8S, E9Y, E9K, E9V, E9E, Y10F, Y10W, Y10Y, M12S, M12L, M12R, M12W, R13H, R13I, R13Y, R13R, R13G, R13S, H14N, A15D, A15V, A15L, A15H, T17T, T17A, T17W, T17L, T17F, T17R, T17S, L18A, L18E, L18N, L18L, L18S, A19N, A19H, A19K, A19A, A19D, A19G, A19M, R21N, K20K, K20A, K20R, K20E, K20G, K20C, K20Q R21A, R21R, R21N, R21Y, R21C G22P, A22W, A22R, W23D, R23H, W23G, W23Q, W23L, W23R, W23H W23D W23M, W23W, W23I, D24E, D24G, D24W, D24D, D24R, E25F, E25M, E25D, E25A, E25G, E25R, E25E, E25H E25V, E25S, E25Y, R26D, R26E, R26G, R26N, R26Q, R26C, R26L, R26K, R26W, R26C, R26P, R26R, R26A, R26H, E27E, E27Q, E27H, E27C, E27G, E27K, E27S, E27P, E27R, E27L, E27V, E27D, V28V, V28A, V28C, V28G, V28P, V28S, V28T, P29V, P29P, P29A, P29G, P29K, P29L, V30V, V30I, V30L, V30F, V30G, V30A, V30M, L34S, L34V, L34L, L34M, L34W, L34G, H36E, H36V, L36H, H36L, H36N, N37N, N37H, N37R, N37T, N37S, N38G, N38R, N38N, N38E, V40I, W45A, W45W, W45R, W45L, W45N, N46N, N46M, N46P, N46G, N46L, N46R, N46V, R46W, R46F, R46Q, R46M, R47A, R47Q, R47F, R47K, R47P, R47W, R47M, R47R, R47G, R47S, R47V, R47H, P48T, P48L, P48A, P48I, P48S, P48R, P48K, P48D, P48E, P48H, P48G, P48P, P48N, I49G, I49H, I49V, I49F, I49H, I49I, I49M, I49N, I49K, I49Q, I49T, G50L, G50S, G50R, G50G, R51H, R51L, R51N, L51W, R51Y, R51G, R51V, R51R, H52D, H52Y, H52I, H52H, D53D, D53E, D53G, D53P, P54C, P54T, P54P, P54E, A55H, T55A, T55I, T55V, T55G, T55T, A56A, A56H, A56W, A56E, A56S, H57P, H57A, H57H, H57N, A58G, A58E, A58A, A58R, E59A, E59G, E59I, E59Q, E59W, E59E, E59T, E59H, E59P, M61A, M61I, M61L, M61V, M61P, M61G, M61I, L63S, L63V, L63T, L63R, L63H, L63A, R64A, R64Q, R64R, R64D, Q65V, Q65H, Q65G, Q65P, Q65F, Q65Q, Q65R, G66V, G66E, G66T, G66G, G66C, G67G, G67W, G67I, G67A, G67D, G67L, G67V, L68Q, L68M, L68V, L68H, L68L, L68G, V69A, V69M, V69V, M70V, M70L, E70A, M70A, M70M, M70E, M70T, M70v, Q71M, Q71N, Q71L, Q71R, Q71Q, Q71I, N72A, N72K, N72S, N72D, N72Y, N72N, N72H, N72G, N72M, Y73G, Y73I, Y73K, Y73R, Y73S, Y73Y, Y73H, Y73A, R74A, R74Q, R74G, R74K, R74L, R74N, R74G, R74K, R74R, I76H, I76R, I76W, I76Y, I76V, I76Q, I76L, I76D, I76F, I76I, I76N, I76T, I76Y, D77G, D77D, D77A, D77Q, A78Y, A78T, A78G, A78A, A78I, T79M, T79R, T79L, T79T, L80M, L80Y, L80I, L80V, L80L, Y81D, Y81V, Y81Y, Y81M, V82A, V82S, V82G, V82T, V82V, V82Q, V82Y, T83L, T83F, T83T, T83N, L84E, L84F, L84Y, L84I, L84L, L84M, L84A, L84T, L84S, E85K, E85G, E85P, E85S, E85E, E85F, E85V, E85R, P86T, P86C, P86P, P86L, P86N, P86K, P86H, C87M, C87I, C87S, C87N, C87P, S87C, S87L, S87V, V88A, V88M, V88V, V88T, V88E, V88D, V88S, C90S, C90P, C90A, C90T, C90M, A91A, A91G, A91S, A91V, A91T, A91C, A91L, G92T, G92M, G92A, G92Y, G92G, A93I, A93C, A93M, A93V, A93A, M94M, M94T, M94A, M94V, M94L, M94I, M94H, I95S, I95G, I95L, I95H, I95V, H96A, H96L, H96R, H96S, H96H, H96N, H96E, S97C, S97G, S97I, S97M, S97R, S97S, S97P, R98K, R98I, R98N, R98Q, R98G, R98H, R98C, R98L, R98R, G100R, G100V, G100K, G100A, G100S, G100M, G100I, R101V, R101R, R101S, R101C, V102A, V102F, V102I, V102V, D103A, V103A, V103G, V103F, V103V, F104G, D104N, F104V, F104I, F104L, F104A, F104F, F104R, G105V, G105W, G105G, G105M, G105A, A106T, V106Q, V106F, V106W, V106M, A106A, A106Q, A106F, A106G, A106W, A106M, A106V, A106R, A106L, A106S, A106B, A106I, R107C, R107G, R107P, R107K, R107A, R107N, R107W, R107H, R107S, R107R, R107F, D108N, D108F, D108G, D108V, D108A, D108Y, D108H, D108I, D108K, D108L, D108M, D108Q, N108Q, N108F, N108W, N108M, N108K, D108K, D108F, D108M, D108Q, D108R, D108W, D108S, D108E, D108T, D108R, D108D, A109H, A109K, A109R, A109S, A109T, A109V, A109A, A109D, K110G, K110H, K110I, K110R, K110T, K110K, K110A, K110I, T111A, T111G, T111H, T111R, T111T, T111K, G112A, G112G, G112H, G112T, G112R, A113N, A114G, A114H, A114V, A114C, A114S, A114A, G115S, G115G, G115M, G115L, G115A, G115F, L117M, L117L, L117W, L117A, L117S, L117N, L117V, M118D, M118G, M118K, M118N, M118V, M118M, M118L, M118R, D119L, D119N, D119S, D119V, D119D, V120H, V120L, V120V, V120T, V120A, V120E, V120G, V120D, L121D, L121M, L121N, L121K, L121L, H122H, H122N, H122P, H122R, H122S, H122Y, H122G, H122T, H122L, H123C, H123G, H123P, H123V, H123Y, Y123H, H123Y, H123H, P124P, P124H, P124A, P124Y, P124D, P124G, P124I, P124L, P124W, G125H, G125I, G125A, G125M, G125K, G125G, G125P, M126D, M126H, M126K, M126I, M126N, M126O, M126S, M126Y, M126M, M126G, N127H, N127S, N127D, N127K, N127R, N127N, N127I, N127P, N127M, H128R, H128N, H128L, H128H, R129H, R129Q, R129V, R129I, R129E, R129V, R129R, R129M, R129P, V130R, V130V, V130E, V130D, E131E, E131I, E131V, E131K, I132I, I132F, I132T, I132L, I132V, I132E, T133V, T133E, T133G, T133K, T133T, T133A, T133H, T133F, T133I, E134A, E134E, E134G, E134I, E134H, E134K, E134T, G135G, G135V, G135I, G135P, G135E, I136G, I136L, I136T, I136I, I137A, I137D, I137E, L137M, I137S, L137L, L137I, A138D, A138E, A138G, S138A, A138N, A138S, A138T, A138V, A138Y, A138A, A138M, A138L, D139E, D139I, D139C, D139L, D139M, D139D, D139G, D139H, D139A, E140A, E140C, E140L, E140R, E140K, E140E, E140D, C141S, C141A, C141C, C141V, C141E, A142N, A142D, A142G, A142A, A142L, A142S, A142T, A142N, A142S, A142V, A142E, A142C, A143D, A143E, A143G, A143D, A143G, A143E, A143L, A143W, A143M, A143S, A143Q, A143R, A143A, A143I, L144S, L144L, L144T, L144A, L145A, L145F, L145G, L145D, L145L, L145C, L145E, L145s, C146R, S146A, S146C, S146D, S146F, S146R, S146T, S146D, S146G, S146S, S146L, D147D, D147L, D147F, D147G, D147Y, Y147T, Y147R, Y147D, D147R, D147Y, D147A, D147T, D147H, D147F, D147U, D147V, D147I, D147C, F148L, F148F, F148R, F148Y, F148A, F148T, F149C, F149M, F149R, F149Y, F149N, F149F, F149A, F149T, F149V R150R, R150M, R150D, R150F, M151F, M151P, M151R, M151V, M151M, M151E, R152C, R152F, R152H, R152P, R152R, R152P, R152Q, R152M, R152O, R153C, R153Q, R153R, R153V, R153E, R153A, R153P, Q154E, Q154H, Q154M, Q154R, Q154L, Q154S, Q154V, Q154Q, Q154F, Q154I, Q154A, Q154K, E155F, E155G, E155I, E155K, E155P, E155V, E155D, E155E, E155L, E155Q, I156V, I156A, I156I, I156L, I156F, I156D, I156K, I156N, I156R, I156Y, E157A, E157F, E157I, E157P, E157T, E157V, N157K, K157N, K157V, K157P, K157I, K157F, K157F, K157T, K157A, K157S, K157R, A158Q, A158K, A158V, A158A, A158D, A158S, A158T, A158N, Q159S, Q159Q, Q159A, Q159F, Q159K, Q159L, Q159N, K160A, K160S, K160E, K160K, K160N, K160F, K160Q, K161T, K161K, K161R, K161I, K161A, K161N, K161Q, K161S, K161T, A162D, A162Q, R162H, R162P, A162S, A162A, A162N, A162M, A162K, Q163G, Q163S, Q163Q, Q163A, Q163H, Q163N, Q163R, S164F, S164S, S164Q, S164I, S164R, S164Y, S165S, S165P, S165Q, S165A, S165D, S165I, S165T, S165Y, T166T, T166Q, T166E, T166S, T166D, T166K, T166I, T166N, T166P, T166R, D167S D167D, D167I, D167G, D167T, D167A and/or D167N mutation in a TadA reference sequence (e.g., TadA*7.10,ecTadA, or TadA8e), and any alternative mutation at the corresponding position, or one or more corresponding mutations in another adenosine deaminase. Additional mutations are described in U.S. Patent Application Publication No. 2022/0307003 A1 U.S. Pat. No. 11,155,803, and International Patent Application Publications No. WO 2023/288304 A2, PCT/CN2022/143408, WO 2018/027078 A1, WO 2021/158921 A1 and WO 2023/034959 A2, the disclosures of which are incorporated herein by reference in their entirety for all purposes.

[0394] In various embodiments, an adenosine deaminase of the disclosure lacks an N-terminal methionine.

[0395] In some embodiments, the disclosure provides TadA variants comprising an alteration at an amino acid selected from one or more of L36, I76, V82, Y147, Q154, and N157 compared to TadA*7.10. In some embodiments, the disclosure provides TadA variants comprising one or more of the following alterations relative to TadA*7.10: L36H, I76Y, V82T, Y147T, Q154S, and N157K. In some embodiments, the disclosure provides TadA variants comprising the following alterations relative to TadA*7.10: L36H, I76Y, V82T, Y147T, Q154S, and N157K. In some embodiments, the disclosure provides TadA variants comprising the following alterations relative to TadA*7.10: F84Y, A109L, A109V, A109I, A109F, A109S, A109T, A109N, V155S, V155T, V155N, F156Y, F156W, F156R, F156N, and F156Q. In some embodiments, the disclosure provides TadA variants comprising the following alterations relative to TadA*7.10: E3N, E3K, E3G, F6A, H14D, L18A, W23I, W23R, P29T, P29Y, P29Q, V35Q, L36S, N38D, G42M, N46Y, P48A, G50A, H52L, A62V, L63R, L63F, Q65R, G67N, L68V, M70I, N72Y, T79H, Y81V, V82S, M94R, G100V, V102E, V102S, R107A, A114C, G115E, M118L, D119L, H122T, P124H, P124K, P124Q, H128R, V130F, I132K, I132T, E140L, A142N, A142S, L144Q, L145R, L145N, Y147A, F149A, R152P, F156N, and K160E.

[0396] In some embodiments, the disclosure provides TadA variants comprising a V82T, Y147T, and/or a Q154S mutation. In some embodiments, the disclosure provides TadA variants comprising a V82T, Y147T, and/or a Q154S mutation. In some embodiments, the disclosure provides TadA*8.8 further comprising a V82T mutation. In some embodiments, the disclosure provides TadA*8.8 further comprising a V82T, a Y147T, and a Q154S mutation. In some embodiments, the disclosure provides TadA*8.17 further comprising a V82T mutation. In some embodiments, the disclosure provides TadA*8.17 further comprising a V82T, a Y147T, and a Q154S mutation. In some embodiments, the disclosure provides TadA*8.20 further comprising a V82T mutation. In some embodiments, the disclosure provides TadA*8.20 further comprising a V82T, a Y147T, and a Q154S mutation.

[0397] In embodiments, a variant of TadA*7.10 comprises one or more alterations selected from any of those alterations provided herein.

[0398] In particular embodiments, an adenosine deaminase heterodimer comprises a TadA*8 domain and an adenosine deaminase domain selected from Staphylococcus aureus (S. aureus) TadA, Bacillus subtilis (B. subtilis) TadA, Salmonella typhimurium (S. typhimurium) TadA, Shewanella putrefaciens (S. putrefaciens) TadA, Haemophilus influenzae F3031 (H. influenzae) TadA, Caulobacter crescentus (C. crescentus) TadA, Geobacter sulfurreducens (G. sulfurreducens) TadA, or TadA*7.10.

[0399] In some embodiments, the TadA*8 is a variant as shown in Table 5D. Table 5D shows certain amino acid position numbers in the TadA amino acid sequence and the amino acids present in those positions in the TadA-7.10 adenosine deaminase. Table 5D also shows amino acid changes in TadA variants relative to TadA-7.10 following phage-assisted non-continuous evolution (PANCE) and phage-assisted continuous evolution (PACE), as described in M. Richter et al., 2020, Nature Biotechnology, doi.org/10.1038/s41587-020-0453-z, the entire contents of which are incorporated by reference herein. In some embodiments, the TadA*8 is TadA*8a, TadA*8b, TadA*8c, TadA*8d, or TadA*8e. In some embodiments, the TadA*8 is TadA*8e. In one embodiment, an adenosine deaminase is a TadA*8 that comprises or consists essentially of SEQ ID NO: 316 or a fragment thereof having adenosine deaminase activity.

TABLE 5D
Select TadA*8 Variants

| | | TadA amino acid number | | | | | | | | | |
|---|---|---|---|---|---|---|---|---|---|---|---|
| | TadA | 26 | 88 | 109 | 111 | 119 | 122 | 147 | 149 | 166 | 167 |
| | TadA-7.10 | R | V | A | T | D | H | Y | F | T | D |
| PANCE 1 | | | | | R | | | | | | |
| PANCE 2 | | | | S/T | R | | | | | | |
| PACE | TadA-8a | C | | S | R | N | N | D | Y | I | N |
| | TadA-8b | | A | S | R | N | N | | Y | I | N |
| | TadA-8c | C | | S | R | N | N | | Y | I | N |
| | TadA-8d | | A | | R | N | | | Y | | |
| | TadA-8e | | | S | R | N | N | D | Y | I | N |

[0400] In some embodiments, the TadA variant is a variant as shown in Table 5E. Table 5E shows certain amino acid position numbers in the TadA amino acid sequence and the amino acids present in those positions in the TadA*7.10 adenosine deaminase. In some embodiments, the TadA variant is MSP605, MSP680, MSP823, MSP824, MSP825, MSP827, MSP828, or MSP829. In some embodiments, the TadA variant is MSP828. In some embodiments, the TadA variant is MSP829.

TABLE 5E
TadA Variants

| | TadA Amino Acid Number | | | | | | | |
|---|---|---|---|---|---|---|---|---|
| Variant | 36 | 76 | 82 | 147 | 149 | 154 | 157 | 167 |
| TadA-7.10 | L | I | V | Y | F | Q | N | D |
| MSP605 | | | G | T | | S | | |
| MSP680 | | Y | G | T | | S | | |
| MSP823 | H | | G | T | | S | K | |
| MSP824 | | | G | D | Y | S | | N |
| MSP825 | H | | G | D | Y | S | K | N |
| MSP827 | H | Y | G | T | | S | K | |
| MSP828 | | Y | G | D | Y | S | | N |
| MSP829 | H | Y | G | D | Y | S | K | N |

[0401] In particular embodiments, the fusion proteins or complexes comprise a single (e.g., provided as a monomer) TadA* (e.g., TadA*8 or TadA*9). Throughout the present disclosure, an adenosine deaminase base editor that comprises a single TadA* domain is indicates using the terminology ABEm or ABE #m, where “#” is an identifying number (e.g., ABE8.20m), where “m” indicates “monomer.” In some embodiments, the TadA* is linked to a Cas9 nickase. In some embodiments, the fusion proteins or complexes of the disclosure comprise as a heterodimer of a wild-type TadA (TadA(wt)) linked to a TadA*. Throughout the present disclosure, an adenosine deaminase base editor that comprises a single TadA* domain and a TadA (wt) domain is indicates using the terminology ABEd or ABE #d, where “#” is an identifying number (e.g., ABE8.20d), where “d” indicates “dimer.” In other embodiments, the fusion proteins or complexes of the disclosure comprise as a heterodimer of a TadA*7.10 linked to a TadA*. In some embodiments, the base editor is ABE8 comprising a TadA* variant monomer. In some embodiments, the base editor is ABE comprising a heterodimer of a TadA* and a TadA (wt). In some embodiments, the base editor is ABE comprising a heterodimer of a TadA* and TadA*7.10. In some embodiments, the base editor is ABE comprising a heterodimer of a TadA*. In some embodiments, the TadA* is selected from Tables 5A-5E.

[0402] In some embodiments, the adenosine deaminase is expressed as a monomer. In other embodiments, the adenosine deaminase is expressed as a heterodimer. In some embodiments, the deaminase or other polypeptide sequence lacks a methionine, for example when included as a component of a fusion protein. This can alter the numbering of positions. However, the skilled person will understand that such corresponding mutations refer to the same mutation.

[0403] Any of the mutations provided herein and any additional mutations (e.g., based on the ecTadA amino acid sequence) can be introduced into any other adenosine deaminases. Any of the mutations provided herein can be made individually or in any combination in a TadA reference sequence or another adenosine deaminase (e.g., ecTadA).

[0404] Details of A to G nucleobase editing proteins are described in International PCT Application No. PCT/US2017/045381 (WO2018/027078) and Gaudelli, N. M., et al., “Programmable base editing of A·T to G·C in genomic DNA without DNA cleavage” Nature, 551, 464-471 (2017), the entire contents of which are hereby incorporated by reference.

### C to T Editing

[0405] In some embodiments, a base editor disclosed herein comprises a fusion protein or complex comprising cytidine deaminase capable of deaminating a target cytidine (C) base of a polynucleotide to produce uridine (U), which has the base pairing properties of thymine. In some embodiments, for example where the polynucleotide is double-stranded (e.g., DNA), the uridine base can then be substituted with a thymidine base (e.g., by cellular repair machinery) to give rise to a C:G to a T:A transition. In other embodiments, deamination of a C to U in a nucleic acid by a base editor cannot be accompanied by substitution of the U to a T.

[0406] The deamination of a target C in a polynucleotide to give rise to a U is a non-limiting example of a type of base editing that can be executed by a base editor described herein. In another example, a base editor comprising a cytidine deaminase domain can mediate conversion of a cytosine (C) base to a guanine (G) base. For example, a U of a polynucleotide produced by deamination of a cytidine by a cytidine deaminase domain of a base editor can be excised from the polynucleotide by a base excision repair mechanism (e.g., by a uracil DNA glycosylase (UDG) domain), producing an abasic site. The nucleobase opposite the abasic site can then be substituted (e.g., by base repair machinery) with another base, such as a C, by for example a translesion polymerase. Although it is typical for a nucleobase opposite an abasic site to be replaced with a C, other substitutions (e.g., A, G or T) can also occur.

[0407] Accordingly, in some embodiments a base editor described herein comprises a deamination domain (e.g., cytidine deaminase domain) capable of deaminating a target C to a U in a polynucleotide. Further, as described below, the base editor can comprise additional domains which facilitate conversion of the U resulting from deamination to, in some embodiments, a T or a G. For example, a base editor comprising a cytidine deaminase domain can further comprise a uracil glycosylase inhibitor (UGI) domain to mediate substitution of a U by a T, completing a C-to-T base editing event. In another example, the base editor can comprise a uracil stabilizing protein as described herein. In another example, a base editor can incorporate a translesion polymerase to improve the efficiency of C-to-G base editing, since a translesion polymerase can facilitate incorporation of a C opposite an abasic site (i.e., resulting in incorporation of a G at the abasic site, completing the C-to-G base editing event).

[0408] A base editor comprising a cytidine deaminase as a domain can deaminate a target C in any polynucleotide, including DNA, RNA and DNA-RNA hybrids.

[0409] In some embodiments, a cytidine deaminase of a base editor comprises all or a portion (e.g., a functional portion) of an apolipoprotein B mRNA editing complex (APOBEC) family deaminase. APOBEC is a family of evolutionarily conserved cytidine deaminases. Members of this family are C-to-U editing enzymes. The N-terminal domain of APOBEC like proteins is the catalytic domain, while the C-terminal domain is a pseudocatalytic domain. More specifically, the catalytic domain is a zinc dependent cytidine deaminase domain and is important for cytidine deamination. APOBEC family members include APOBEC1, APOBEC2, APOBEC3A, APOBEC3B, APOBEC3C, APOBEC3D (“APOBEC3E” now refers to this), APOBEC3F, APOBEC3G, APOBEC3H, APOBEC4, and Activation-induced (cytidine) deaminase.

[0410] Other exemplary deaminases that can be fused to Cas9 according to aspects of this disclosure are provided below. In embodiments, the deaminases are activation-induced deaminases (AID). It should be understood that, in some embodiments, the active domain of the respective sequence can be used, e.g., the domain without a localizing signal (nuclear localization sequence, without nuclear export signal, cytoplasmic localizing signal).

[0411] Some aspects of the present disclosure are based on the recognition that modulating the deaminase domain catalytic activity of any of the fusion proteins or complexes described herein, for example by making point mutations in the deaminase domain, affect the processivity of the fusion proteins (e.g., base editors) or complexes. For example, mutations that reduce, but do not eliminate, the catalytic activity of a deaminase domain within a base editing fusion protein or complexes can make it less likely that the deaminase domain will catalyze the deamination of a residue adjacent to a target residue, thereby narrowing the deamination window. The ability to narrow the deamination window can prevent unwanted deamination of residues adjacent to specific target residues, which can reduce or prevent off-target effects.

[0412] In some embodiments, an APOBEC deaminase incorporated into a base editor can comprise one or more mutations selected from the group consisting of H121R, H122R, R126A, R126E, R118A, W90A, W90Y, and R132E of rAPOBEC1; D316R, D317R, R320A, R320E, R313A, W285A, W285Y, and R326E of hAPOBEC3G; and any alternative mutation at the corresponding position, or one or more corresponding mutations in another APOBEC deaminase.

[0413] A number of modified cytidine deaminases are commercially available, including, but not limited to, SaBE3, SaKKH-BE3, VQR-BE3, EQR-BE3, VRER-BE3, YE1-BE3, EE-BE3, YE2-BE3, and YEE-BE3, which are available from Addgene (plasmids 85169, 85170, 85171, 85172, 85173, 85174, 85175, 85176, 85177). In some embodiments, a deaminase incorporated into a base editor comprises all or a portion (e.g., a functional portion) of an APOBEC1 deaminase.

[0414] In some embodiments, the fusion proteins or complexes of the disclosure comprise one or more cytidine deaminase domains. In some embodiments, the cytidine deaminases provided herein are capable of deaminating cytosine or 5-methylcytosine to uracil or thymine. In some embodiments, the cytidine deaminases provided herein are capable of deaminating cytosine in DNA. The cytidine deaminase may be derived from any suitable organism. In some embodiments, the cytidine deaminase is a naturally-occurring cytidine deaminase that includes one or more mutations corresponding to any of the mutations provided herein. One of skill in the art will be able to identify the corresponding residue in any homologous protein, e.g., by sequence alignment and determination of homologous residues. Accordingly, one of skill in the art would be able to generate mutations in any naturally-occurring cytidine deaminase that corresponds to any of the mutations described herein. In some embodiments, the cytidine deaminase is from a prokaryote. In some embodiments, the cytidine deaminase is from a bacterium. In some embodiments, the cytidine deaminase is from a mammal (e.g., human).

[0415] In some embodiments, the cytidine deaminase comprises an amino acid sequence that is at least 60%, at least 65%, at least 70%, at least 75%, at least 80%, at least 85%, at least 90%, at least 95%, at least 96%, at least 97%, at least 98%, at least 99%, or at least 99.5% identical to any one of the cytidine deaminase amino acid sequences set forth herein. It should be appreciated that cytidine deaminases provided herein may include one or more mutations (e.g., any of the mutations provided herein). Some embodiments provide a polynucleotide molecule encoding the cytidine deaminase nucleobase editor polypeptide of any previous aspect or as delineated herein. In some embodiments, the polynucleotide is codon optimized.

[0416] In embodiments, a fusion protein of the disclosure comprises two or more nucleic acid editing domains.

[0417] Details of C to T nucleobase editing proteins are described in International PCT Application No. PCT/US2016/058344 (WO2017/070632) and Komor, A. C., et al., “Programmable editing of a target base in genomic DNA without double-stranded DNA cleavage” Nature 533, 420-424 (2016), the entire contents of which are hereby incorporated by reference.

### Cytidine Adenosine Base Editors (CABEs)

[0418] In some embodiments, a base editor described herein comprises an adenosine deaminase variant that has increased cytidine deaminase activity. Such base editors may be referred to as “cytidine adenosine base editors (CABEs)” or “cytosine base editors derived from TadA* (CBE-Ts),” and their corresponding deaminase domains may be referred to as “TadA* acting on DNA cytosine (TADC)” domains or TadA-derived cytidine deaminases (TadA-CD). Base editors containing adenosine deaminase variants having both cytidine deaminase and adenosine deaminase activity (i.e., TadA-Dual deaminases) may be referred to as TadA-based dual editors (TadDE). In some instances, an adenosine deaminase variant has both adenine and cytosine deaminase activity (i.e., is a dual deaminase). In some embodiments, the adenosine deaminase variants deaminate adenine and cytosine in DNA. In some embodiments, the adenosine deaminase variants deaminate adenine and cytosine in single-stranded DNA. In some embodiments, the adenosine deaminase variants deaminate adenine and cytosine in RNA. In some embodiments, the adenosine deaminase variant predominantly deaminates cytosine in DNA and/or RNA (e.g., greater than 30%, 40%, 50%, 60%, 70%, 80%, 90%, 95%, or 99% of all deaminations catalyzed by the adenosine deaminase variant, or the number of cytosine deaminations catalyzed by the variant is about or at least about 2-fold, 3-fold, 4-fold, 5-fold, 6-fold, 7-fold, 8-fold, 9-fold, 10-fold, 25-fold, 50-fold, 75-fold, 100-fold, 500-fold, or 1,000-fold greater than the number adenine deaminations catalyzed by the variant). In some embodiments, the adenosine deaminase variant has approximately equal cytosine and adenosine deaminase activity (e.g., the two activities are within about 10% or 20% of each other). In some embodiments, the adenosine deaminase variant has predominantly cytosine deaminase activity, and little, if any, adenosine deaminase activity. In some embodiments, the adenosine deaminase variant has cytosine deaminase activity, and no significant or no detectable adenosine deaminase activity. In some embodiments, the target polynucleotide is present in a cell in vitro or in vivo. In some embodiments, the cell is a bacteria, yeast, fungi, insect, plant, or mammalian cell. Examples of adenosine deaminase variants having increased cytidine deaminase activity include those described in International Patent Application Publications No. WO 2024/040083 and WO 2022/204574, the disclosures of which are hereby incorporated by reference in their entireties for all purposes.

[0419] In some embodiments, the CABE comprises a bacterial TadA deaminase variant (e.g., ecTadA). In some embodiments, the CABE comprises a truncated TadA deaminase variant. In some embodiments, the CABE comprises a fragment of a TadA deaminase variant. In some embodiments, the CABE comprises a TadA*8.20 variant.

[0420] In some embodiments, an adenosine deaminase variant of the disclosure is a TadA adenosine deaminase comprising one or more alterations that increase cytosine deaminase activity (e.g., at least about 10-fold, 20-fold, 30-fold, 40-fold, 50-fold, 60-fold, 70-fold or more increase) while maintaining adenosine deaminase activity (e.g., at least about 30%, 40%, 50% or more of the activity of a reference adenosine deaminase (e.g., TadA*8.20 or TadA*8.19)). In some instances, the adenosine deaminase variant comprises one or more alterations that increase cytosine deaminase activity (e.g., at least about 10-fold, 20-fold, 30-fold, 40-fold, 50-fold, 60-fold, 70-fold or more increase) relative to the activity of a reference adenosine deaminase and comprise undetectable adenosine deaminase activity or adenosine deaminase activity that is less than 30%, 20%, 10%, or 5% of that of a reference adenosine deaminase. In some embodiments, the reference adenosine deaminase is TadA*8.20 or TadA*8.19.

[0421] In some embodiments, the adenosine deaminase variant is an adenosine deaminase comprising two or more alterations at an amino acid position selected from the group consisting of 2, 4, 6, 8, 13, 17, 23, 27, 29, 30, 47, 48, 49, 67, 76, 77, 82, 84, 96, 100, 107, 112, 114, 115, 118, 119, 122, 127, 142, 143, 147, 149, 158, 159, 162 165, 166, and 167, of an amino acid sequence having at least about 70%, 75%, 80%, 85%, 90%, 95%, 98%, 99% or greater identity to SEQ ID NO: 1, or a corresponding alteration in another deaminase. I

[0422] In some embodiments, the adenosine deaminase variant is an adenosine deaminase comprising one or more alterations selected from the group consisting of S2H, V4K, V4S, V4T, V4Y, F6G, F6H, F6Y, H8Q, R13G, T17A, T17W, R23Q, E27C, E27G, E27H, E27K, E27Q, E27S, E27G, P29A, P29G, P29K, V30F, V30I, R47G, R47S, A48G, I49K, I49M, I49N, I49Q, I49T, G67W, I76H, I76R, I76W, Y76H, Y76R, Y76W, F84A, F84M, H96N, G100A, G100K, T111H, G112H, A114C, G115M, M118L, H122G, H122R, H122T, N127I, N127K, N127P, A142E, R147H, A158V, Q159S, A162C, A162N, A162Q, and S165P of an amino acid sequence having at least about 70%, 75%, 80%, 85%, 90%, 95%, 98%, 99% or greater identity to SEQ ID NO: 1, or a corresponding alteration in another deaminase.

[0423] In some embodiments, the adenosine deaminase variant is an adenosine deaminase comprising an amino acid alteration or combination of amino acid alterations selected from those listed in any of Tables 6A-6F.

[0424] The residue identity of exemplary adenosine deaminase variants that are capable of deaminating adenine and/or cytidine in a target polynucleotide (e.g., DNA) is provided in Tables 6A-6F below. Further examples of adenosine deaminase variants include the following variants of 1.17 (see Table 6A): 1.17+E27H; 1.17+E27K; 1.17+E27S; 1.17+E27S+I49K; 1.17+E27G; 1.17+149N; 1.17+E27G+I49N; and 1.17+E27Q. In some embodiments, any of the amino acid alterations provided herein are substituted with a conservative amino acid. Additional mutations known in the art can be further added to any of the adenosine deaminase variants provided herein.

[0425] In some embodiments, the base editor systems comprising a CABE provided herein have at least about a 30%, 40%, 50%, 60%, 70% or more C to T editing activity in a target polynucleotide (e.g., DNA). In some embodiments, a base editor system comprising a CABE as provided herein has an increased C to T base editing activity (e.g., increased at least about 30-fold, 40-fold, 50-fold, 60-fold, 70-fold or more) relative to a reference base editor system comprising a reference adenosine deaminase (e.g., TadA*8.20 or TadA*8.19).

TABLE 6A
Adenosine Deaminase Variants. Mutations are indicated with reference to TadA*8.20.
“S” indicates “Surface,” and “NAS” indicates “Near Active Site.”

| | location in structure | | | | | | | | | | |
|---|---|---|---|---|---|---|---|---|---|---|---|
| | N/A | Sh1 | Sh1 | Sh1 | NAS | NAS | NAS | NAS | | S | |
| | Amino Acid No. (*START Met is AA#1) | | | | | | | | | | |
| | 2 | 8 | 13 | 17 | 27 | 47 | 48 | 49 | 67 | 76 | 77 |
| TadA*8.20 | S | H | R | T | E | R | A | I | G | Y | D |
| TadA*8.19 | | | | | | | | | | I | |
| 1.1 | | | | | H | | | | | I | |
| 1.2 | | | | | H | | | K | | I | |
| 1.3 | | | | | S | | | K | | I | |
| 1.4 | | | | | S | | | K | | I | |
| 1.5 | | | | | K | | | | | | |
| 1.6 | | | | | K | | | | | | |
| 1.7 | | | | | H | | | | | I | |
| 1.8 | | | | | S | | | K | W | | |
| 1.9 | | | | | | | | T | W | | |
| 1.10 | | | | | C | | | | | I | |
| 1.11 | | | G | | Q | | | | | | |
| 1.12 | | | | A | H | | | M | | I | |
| 1.13 | | | | | | | | Q | | I | |
| 1.14 | H | | | | | | | K | | I | |
| TadA*8.20 | S | H | R | T | E | R | A | I | G | Y | D |
| TadA*8.19 | | | | | | | | | | I | |
| 1.15 | | | | | | S | | | | | |
| 1.16 | | Q | | | | | | Q | | I | |
| 1.17 | | | | A | | | G | | | | |
| 1.18 | | | | | G | | | | | | |
| 1.19 | | | | | G | | | N | | | |
| 1.20 | | | | | G | | | | | | G |

| | location in structure | | | | | | | | | | | |
|---|---|---|---|---|---|---|---|---|---|---|---|---|
| | I | NAS | | NAS | S | | S | S | S | | S | |
| | Amino Acid No. (*START Met is AA#1) | | | | | | | | | | | |
| | 82 | 84 | 96 | 107 | 112 | 115 | 118 | 119 | 127 | 142 | 162 | 165 |
| TadA*8.20 | S | F | H | R | G | G | M | D | N | A | A | S |
| TadA*8.19 | | | | | | | | | | | | |
| 1.1 | | M | | | | | | | | | | |
| 1.2 | | | | | | | | | | | | |
| 1.3 | | | | | | | | | | | | |
| 1.4 | | | | | | | | | | | N | |
| 1.5 | | | | | | | | | | | | |
| 1.6 | | | | | | | | N | | | | |
| 1.7 | | | | | | | | | | | | |
| 1.8 | | | | | | | | | | | | |
| 1.9 | | | N | | | | | | | | | |
| 1.10 | | | | | | | | N | | | | |
| 1.11 | | | | | | | | | K | | | |
| 1.12 | | | | | | | L | | | | | |
| 1.13 | | | | | | M | | | | | | |
| 1.14 | | | | | H | | | | | | | |
| 1.15 | | | | C | | | | | | | | |
| 1.16 | | | | | | | | | | | | |
| 1.17 | T | | | | | | | | | E | | |
| 1.18 | | | | | | | | | | | | |
| 1.19 | | | | | | | | | | | | |
| 1.20 | | | | | | | | | | | | P |

TABLE 6B
Adenosine deaminase variants. Mutations are
indicated with reference to TadA*8.20.

| | Position No. | | | | | | | | | |
|---|---|---|---|---|---|---|---|---|---|---|
| | 27 | 29 | 30 | 49 | 82 | 84 | 107 | 112 | 115 | 142 |
| | TadA*8.20 | | | | | | | | | |
| | E | P | V | I | S | F | R | G | G | A |
| | Alterations Evaluated | | | | | | | | | |
| | G/S/H | G/A/K | I/L/F | K | T | L/A | C | H | M | E |
| S1.1 | S | | | K | T | | | | | |
| S1.2 | S | | | K | T | | C | | | |
| S1.3 | S | | | K | T | | | H | | |
| S1.4 | S | | | K | T | | | | M | |
| S1.5 | S | | | K | T | | | | | E |
| S1.6 | S | | | K | T | | C | H | | |
| S1.7 | S | | | K | T | | C | | M | |
| S1.8 | S | | | K | T | | C | | | E |
| S1.9 | S | | | K | T | | | H | | E |
| S1.10 | S | | | K | T | | | | M | E |
| S1.11 | S | | | K | T | | C | H | M | E |
| S1.12 | S | | I | K | T | | | | | |
| S1.13 | S | | I | K | T | | C | | | |
| S1.14 | S | | I | K | T | | | H | | |
| S1.15 | S | | I | K | T | | | | M | |
| S1.16 | S | | I | K | T | | | | | E |
| S1.17 | S | | I | K | T | | C | H | | |
| S1.18 | S | | I | K | T | | C | | M | |
| S1.19 | S | | I | K | T | | C | | | E |
| S1.20 | S | | I | K | T | | | H | | E |
| S1.21 | S | | I | K | T | | | | M | E |
| S1.22 | S | | I | K | T | | C | H | M | E |
| S1.23 | S | | L | K | T | | | | | |
| S1.24 | S | | L | K | T | | C | | | |
| S1.25 | S | | L | K | T | | | H | | |
| S1.26 | S | | L | K | T | | | | M | |
| S1.27 | S | | L | K | T | | | | | E |
| S1.28 | S | | L | K | T | | C | H | | |
| S1.29 | S | | L | K | T | | C | | M | |
| S1.30 | S | | L | K | T | | C | | | E |
| S1.31 | S | | L | K | T | | | H | | E |
| S1.32 | S | | L | K | T | | | | M | E |
| S1.33 | S | | L | K | T | | C | H | M | E |
| S1.34 | S | | F | K | T | A | | | | |
| S1.35 | S | | F | K | T | A | C | | | |
| S1.36 | S | | F | K | T | A | | H | | |
| S1.37 | S | | F | K | T | A | | | M | |
| S1.38 | S | | F | K | T | A | | | | E |
| S1.39 | S | | F | K | T | A | C | H | | |
| S1.40 | S | | F | K | T | A | C | | M | |
| S1.41 | S | | F | K | T | A | C | | | E |
| S1.42 | S | | F | K | T | A | | H | | E |
| S1.43 | S | | F | K | T | A | | | M | E |
| S1.44 | S | | F | K | T | A | C | H | M | E |
| S1.45 | S | | | K | T | L | | | | |
| S1.46 | S | | | K | T | L | C | | | |
| S1.47 | S | | | K | T | L | | H | | |
| S1.48 | S | | | K | T | L | | | M | |
| S1.49 | S | | | K | T | L | | | | E |
| S1.50 | S | | | K | T | L | C | H | | |
| S1.51 | S | | | K | T | L | C | | M | |
| S1.52 | S | | | K | T | L | C | | | E |
| S1.53 | S | | | K | T | L | | H | | E |
| S1.54 | S | | | K | T | L | | | M | E |
| S1.55 | S | | | K | T | L | C | H | M | E |
| S1.56 | S | | I | K | T | L | | | | |
| S1.57 | S | | I | K | T | L | C | | | |
| S1.58 | S | | I | K | T | L | | H | | |
| S1.59 | S | | I | K | T | L | | | M | |
| S1.60 | S | | I | K | T | L | | | | E |
| S1.61 | S | | I | K | T | L | C | H | | |
| S1.62 | S | | I | K | T | L | C | | M | |
| S1.63 | S | | I | K | T | L | C | | | E |
| S1.64 | S | | I | K | T | L | | H | | E |
| S1.65 | S | | I | K | T | L | | | M | E |
| S1.66 | S | | I | K | T | L | C | H | M | E |
| S1.67 | S | G | | K | T | | | | | |
| S1.68 | S | G | | K | T | | C | | | |
| S1.69 | S | G | | K | T | | | H | | |
| S1.70 | S | G | | K | T | | | | M | |
| S1.71 | S | G | | K | T | | | | | E |
| S1.72 | S | G | | K | T | | C | H | | |
| S1.73 | S | G | | K | T | | C | | M | |
| S1.74 | S | G | | K | T | | C | | | E |
| S1.75 | S | G | | K | T | | | H | | E |
| S1.76 | S | G | | K | T | | | | M | E |
| S1.77 | S | G | | K | T | | C | H | M | E |
| S1.78 | | G | | K | T | | | | | |
| S1.79 | | G | | K | T | | C | | | |
| S1.80 | | G | | K | T | | | H | | |
| S1.81 | | G | | K | T | | | | M | |
| S1.82 | | G | | K | T | | | | | E |
| S1.83 | | G | | K | T | | C | H | | |
| S1.84 | | G | | K | T | | C | | M | |
| S1.85 | | G | | K | T | | C | | | E |
| S1.86 | | G | | K | T | | | H | | |
| S1.87 | | G | | K | T | | | | M | E |
| S1.88 | | G | | K | T | | C | H | M | E |
| S1.89 | | K | | K | T | | | | | |
| S1.90 | | K | | K | T | | C | | | |
| S1.91 | | K | | K | T | | | H | | |
| S1.92 | | K | | K | T | | | | M | |
| S1.93 | | K | | K | T | | | | | E |
| S1.94 | | K | | K | T | | C | H | | |
| S1.95 | | K | | K | T | | C | | M | |
| S1.96 | | K | | K | T | | C | | | E |
| S1.97 | | K | | K | T | | | H | | E |
| S1.98 | | K | | K | T | | | | M | E |
| S1.99 | | K | | K | T | | C | H | M | E |
| S1.100 | | K | | K | T | | | | | |
| S1.101 | | K | I | K | T | | C | | | |
| S1.102 | | K | I | K | T | | | H | | |
| S1.103 | | K | I | K | T | | | | M | |
| S1.104 | | K | I | K | T | | | | | E |
| S1.105 | | K | I | K | T | | C | H | | |
| S1.106 | | K | I | K | T | | C | | M | |
| S1.107 | | K | I | K | T | | C | | | E |
| S1.108 | | K | I | K | T | | | H | | E |
| S1.109 | | K | I | K | T | | | | M | E |
| S1.110 | | K | I | K | T | | C | H | M | E |
| S1.111 | | K | | K | T | L | | | | |
| S1.112 | | K | | K | T | L | C | | | |
| S1.113 | | K | | K | T | L | | H | | |
| S1.114 | | K | | K | T | L | | | M | |
| S1.115 | | K | | K | T | L | | | | E |
| S1.116 | | K | | K | T | L | C | H | | |
| S1.117 | | K | | K | T | L | C | | M | |
| S1.118 | | K | | K | T | L | C | | | E |
| S1.119 | | K | | K | T | L | | H | | E |
| S1.120 | | K | | K | T | L | | | M | E |
| S1.121 | | K | | K | T | L | C | H | M | E |
| S1.122 | | K | I | K | T | L | | | | |
| S1.123 | | K | I | K | T | L | C | | | |
| S1.124 | | K | I | K | T | L | | H | | |
| S1.125 | | K | I | K | T | L | | | M | |
| S1.126 | | K | I | K | T | L | | | | E |
| S1.127 | | K | I | K | T | L | C | H | | |
| S1.128 | | K | I | K | T | L | C | | M | |
| S1.129 | | K | I | K | T | L | C | | | E |
| S1.130 | | K | I | K | T | L | | H | | E |
| S1.131 | | K | I | K | T | L | | | M | E |
| S1.132 | | K | I | K | T | L | C | H | M | E |
| S1.133 | G | | | K | T | | | | | |
| S1.134 | G | | | K | T | | C | | | |
| S1.135 | G | | | K | T | | | H | | |
| S1.136 | G | | | K | T | | | | M | |
| S1.137 | G | | | K | T | | | | | E |
| S1.138 | G | | | K | T | | C | H | | |
| S1.139 | G | | | K | T | | C | | M | |
| S1.140 | G | | | K | T | | C | | | E |
| S1.141 | G | | | K | T | | | H | | E |
| S1.142 | G | | | K | T | | | | M | E |
| S1.143 | G | | | K | T | | C | H | M | E |
| S1.144 | H | | | K | T | | | | | |
| S1.145 | H | | | K | T | | C | | | |
| S1.146 | H | | | K | T | | | H | | |
| S1.147 | H | | | K | T | | | | M | |
| S1.148 | H | | | K | T | | | | | E |
| S1.149 | H | | | K | T | | C | H | | |
| S1.150 | H | | | K | T | | C | | M | |
| S1.151 | H | | | K | T | | C | | | E |
| S1.152 | H | | | K | T | | | H | | E |
| S1.153 | H | | | K | T | | | | M | E |
| S1.154 | H | | | K | T | | C | H | M | E |
| S1.155 | S | | | | T | | | | | |
| S1.156 | S | | | | T | | C | | | |
| S1.157 | S | | | | T | | | H | | |
| S1.158 | S | | | | T | | | | M | |
| S1.159 | S | | | | T | | | | | E |
| S1.160 | S | | | | T | | C | H | | |
| S1.161 | S | | | | T | | C | | M | |
| S1.162 | S | | | | T | | C | | | E |
| S1.163 | S | | | | T | | | H | | E |
| S1.164 | S | | | | T | | | | M | E |
| S1.165 | S | | | | T | | C | H | M | E |
| S1.166 | | A | | | T | | | | | |
| S1.167 | | A | | | T | | C | | | |
| S1.168 | | A | | | T | | | H | | |
| S1.169 | | A | | | T | | | | M | |
| S1.170 | | A | | | T | | | | | E |
| S1.171 | | A | | | T | | C | H | | |
| S1.172 | | A | | | T | | C | | M | |
| S1.173 | | A | | | T | | C | | | E |
| S1.174 | | A | | | T | | | H | | E |
| S1.175 | | A | | | T | | | | M | E |
| S1.176 | | A | | | T | | C | H | M | E |
| S1.177 | S | | I | | T | | | | | |
| S1.178 | S | | I | | T | | C | | | |
| S1.179 | S | | I | | T | | | H | | |
| S1.180 | S | | I | | T | | | | M | |
| S1.181 | S | | I | | T | | | | | E |
| S1.182 | S | | I | | T | | C | H | | |
| S1.183 | S | | I | | T | | C | | M | |
| S1.184 | S | | I | | T | | C | | | E |
| S1.185 | S | | I | | T | | | H | | E |
| S1.186 | S | | I | | T | | | | M | E |
| S1.187 | S | | I | | T | | C | H | M | E |
| S1.188 | | A | I | | T | L | | | | |
| S1.189 | | A | I | | T | L | C | | | |
| S1.190 | | A | I | | T | L | | H | | |
| S1.191 | | A | I | | T | L | | | M | |
| S1.192 | | A | I | | T | L | | | | E |
| S1.193 | | A | I | | T | L | C | H | | |
| S1.194 | | A | I | | T | L | C | | M | |
| S1.195 | | A | I | | T | L | C | | | E |
| S1.196 | | A | I | | T | L | | H | | E |
| S1.197 | | A | I | | T | L | | | M | E |
| S1.198 | | A | I | | T | L | C | H | M | E |
| S1.199 | S | A | L | K | T | L | C | H | M | E |

TABLE 6C
Adenosine deaminase variants. Mutations are indicated with reference to variant 1.2 (Table 6A).

| | | Residue identity (START Met | | | | | | | | |
|---|---|---|---|---|---|---|---|---|---|---|
| Variant | Alternative | is amino acid #1) | | | | | | | | |
| Name | Variant Names | 4 | 6 | 17 | 23 | 76 | 77 | 100 | 111 | 114 |
| Reference | 1.2 (see Table 6A) | V | F | T | R | I | D | G | T | A |
| TadAC2.1 | pDKL-135; 2.1 | K | | | | | | | | C |
| TadAC2.2 | pDKL-136; 2.2 | K | | | | | G | | | |
| Reference | 1.2 (see Table 6A) | V | F | T | R | I | D | G | T | A |
| TadAC2.3 | pDKL-137; 2.3 | | Y | | | | | A | | |
| TadAC2.4 | pDKL-138; 2.4 | T | | | | R | | | | |
| TadAC2.5 | pDKL-139; 2.5 | | Y | | | W | | | | |
| TadAC2.6 | pDKL-140; 2.6 | | Y | | | | | | | |
| TadAC2.7 | pDKL-141; 2.7 | | Y | | | | | | | C |
| TadAC2.8 | pDKL-142; 2.8 | | Y | | | | | | | |
| TadAC2.9 | pDKL-143; 2.9 | K | | | | M | | | | |
| TadAC2.10 | pDKL-144; 2.10 | | G | | | R | | K | | |
| TadAC2.11 | pDKL-145; 2.11 | | H | | | | | | | |
| TadAC2.12 | pDKL-146; 2.12 | | | | | | | | | C |
| TadAC2.13 | pDKL-147; 2.13 | | Y | | | H | | | | |
| TadAC2.14 | pDKL-148; 2.14 | | | | | | | | | |
| TadAC2.15 | pDKL-149; 2.15 | | | | Q | R | | | | |
| TadAC2.16 | pDKL-150; 2.16 | | | | | H | | | | |
| TadAC2.17 | pDKL-151; 2.17 | | Y | | | | | | H | |
| TadAC2.18 | pDKL-152; 2.18 | | | | | W | | | | |
| TadAC2.19 | pDKL-153; 2.19 | | | | | | | | H | |
| TadAC2.20 | pDKL-154; 2.20 | | | | | | | | | |
| TadAC2.21 | pDKL-155; 2.21 | | Y | | | R | | | | |
| TadAC2.22 | pDKL-156; 2.22 | | | W | | H | | | | |
| TadAC2.23 | pDKL-157; 2.23 | S | | | | Y | | | | |
| TadAC2.24 | pDKL-158; 2.24 | | | | | | | | | |

| | | Residue identity (START Met is | | | | | | | | |
|---|---|---|---|---|---|---|---|---|---|---|
| | Alternative | amino acid #1) | | | | | | | | |
| Variant Name | Variant Names | 119 | 122 | 127 | 143 | 147 | 158 | 159 | 162 | 166 |
| Reference | 1.2 (see Table 6A) | D | H | N | A | R | A | Q | A | T |
| TadAC2.1 | pDKL-135; 2.1 | | | | | | | | | |
| TadAC2.2 | pDKL-136; 2.2 | | | | | | | | | |
| TadAC2.3 | pDKL-137; 2.3 | | R | | | | | | | |
| TadAC2.4 | pDKL-138; 2.4 | | G | | | | | | | |
| TadAC2.5 | pDKL-139; 2.5 | | | | | | | | | |
| TadAC2.6 | pDKL-140; 2.6 | N | | | | | | | | |
| TadAC2.7 | pDKL-141; 2.7 | | | | | | | | | |
| TadAC2.8 | pDKL-142; 2.8 | | | | | | | | | |
| Reference | 1.2 (see Table 6A) | D | H | N | A | R | A | Q | A | T |
| TadAC2.9 | pDKL-143; 2.9 | | T | | | | | | | |
| TadAC2.10 | pDKL-144; 2.10 | | | | | | | | | |
| TadAC2.11 | pDKL-145; 2.11 | | N | | | | | | | |
| TadAC2.12 | pDKL-146; 2.12 | | | | | | | | | |
| TadAC2.13 | pDKL-147; 2.13 | | R | | | | | | | I |
| TadAC2.14 | pDKL-148; 2.14 | | | P | | | | | | |
| TadAC2.15 | pDKL-149; 2.15 | | | | | | | | | |
| TadAC2.16 | pDKL-150; 2.16 | | R | | | | V | | | |
| TadAC2.17 | pDKL-151; 2.17 | | | | | | | | | |
| TadAC2.18 | pDKL-152; 2.18 | | | | | | | | | |
| TadAC2.19 | pDKL-153; 2.19 | | G | | | | | | C | |
| TadAC2.20 | pDKL-154; 2.20 | | | | E | | | | | |
| TadAC2.21 | pDKL-155; 2.21 | | | | | | | | | |
| TadAC2.22 | pDKL-156; 2.22 | | G | | | | V | | | |
| TadAC2.23 | pDKL-157; 2.23 | | | | E | | | S | | |
| TadAC2.24 | pDKL-158; 2.24 | | | I | | | | | Q | |

TABLE 6D
Adenosine deaminase variants. Mutations are indicated with reference to TadA*8.20.

| | AA Positions | | | | | | | | | | | | | | |
|---|---|---|---|---|---|---|---|---|---|---|---|---|---|---|---|
| | 6 | 27 | 49 | 76 | 77 | 82 | 107 | 112 | 114 | 115 | 119 | 122 | 127 | 142 | 143 |
| TadA*8.20 | F | E | I | Y | D | S | R | G | A | G | D | H | N | A | A |
| S1.154 | F | H | K | Y | D | T | C | H | | M | | | | E | |
| Alterations | Y | | | W | G | | | | C | | N | G | P | | E |
| from Table | | | | | | | | | | | | | | | |
| 6C | | | | | | | | | | | | | | | |
| S2.1 | Y | H | K | W | | T | C | H | | M | | | | E | |
| S2.2 | Y | H | K | | G | T | C | H | | M | | | | E | |
| S2.3 | Y | H | K | | | T | C | H | C | M | | | | E | |
| S2.4 | Y | H | K | | | T | C | H | | M | N | | | E | |
| S2.5 | Y | H | K | | | T | C | H | | M | | G | | E | |
| S2.6 | Y | H | K | | | T | C | H | | M | | | P | E | |
| S2.7 | Y | H | K | | | T | C | H | | M | | | | E | E |
| S2.8 | Y | H | K | | | T | C | H | | M | | | | A | E |
| S2.9 | Y | H | K | W | G | T | C | H | | M | | | | E | |
| S2.10 | Y | H | K | W | | T | C | H | C | M | | | | E | |
| S2.11 | Y | H | K | W | | T | C | H | | M | N | | | E | |
| S2.12 | Y | H | K | W | | T | C | H | | M | | G | | E | |
| S2.13 | Y | H | K | W | | T | C | H | | M | | | P | E | |
| S2.14 | Y | H | K | W | | T | C | H | | M | | | | E | E |
| S2.15 | Y | H | K | W | | T | C | H | | M | | | | A | E |
| S2.16 | Y | H | K | | G | T | C | H | C | M | | | | E | |
| S2.17 | Y | H | K | | G | T | C | H | | M | N | | | E | |
| S2.18 | Y | H | K | | G | T | C | H | | M | | G | | E | |
| S2.19 | Y | H | K | | G | T | C | H | | M | | | P | E | |
| S2.20 | Y | H | K | | G | T | C | H | | M | | | | E | E |
| S2.21 | Y | H | K | | G | T | C | H | | M | | | | A | E |
| S2.22 | Y | H | K | | | T | C | H | C | M | N | | | E | |
| S2.23 | Y | H | K | | | T | C | H | C | M | | G | | E | |
| S2.24 | Y | H | K | | | T | C | H | C | M | | | P | E | |
| S2.25 | Y | H | K | | | T | C | H | | M | N | G | | E | |
| S2.26 | Y | H | K | | | T | C | H | | M | N | | P | E | |
| S2.27 | Y | H | K | | | T | C | H | | M | | G | P | E | |
| S2.28 | Y | H | K | W | G | T | C | H | C | M | | | | E | |
| S2.29 | Y | H | K | W | G | T | C | H | | M | N | | | E | |
| S2.30 | Y | H | K | W | G | T | C | H | | M | | G | | E | |
| S2.31 | Y | H | K | W | G | T | C | H | | M | | | P | E | |
| S2.32 | Y | H | K | W | G | T | C | H | | M | | | | E | E |
| S2.33 | Y | H | K | W | G | T | C | H | | M | | | | A | E |
| S2.34 | Y | H | K | W | | T | C | H | C | M | N | | | E | |
| S2.35 | Y | H | K | W | | T | C | H | C | M | | G | | E | |
| S2.36 | Y | H | K | W | | T | C | H | C | M | | | P | E | |
| S2.37 | Y | H | K | W | | T | C | H | C | M | | | | E | E |
| S2.38 | Y | H | K | W | | T | C | H | C | M | | | | A | E |
| S2.39 | Y | H | K | W | | T | C | H | | M | N | G | | E | |
| S2.40 | Y | H | K | W | | T | C | H | | M | N | | P | E | |
| S2.41 | Y | H | K | W | | T | C | H | | M | | G | P | E | |
| S2.42 | Y | H | K | W | | T | C | H | C | M | N | G | | E | |
| S2.43 | Y | H | K | W | | T | C | H | C | M | N | | P | E | |
| S2.44 | Y | H | K | W | | T | C | H | C | M | | G | P | E | |
| S2.45 | Y | H | K | W | G | T | C | H | C | M | N | | | E | |
| S2.46 | Y | H | K | W | G | T | C | H | C | M | | G | | E | |
| S2.47 | Y | H | K | W | G | T | C | H | C | M | | | P | E | |
| S2.48 | Y | H | K | W | G | T | C | H | C | M | | | | E | E |
| S2.49 | Y | H | K | W | G | T | C | H | C | M | | | | A | E |
| S2.50 | Y | H | K | W | G | T | C | H | C | M | N | G | | E | |
| S2.51 | Y | H | K | W | G | T | C | H | C | M | N | | P | E | |
| S2.52 | Y | H | K | W | G | T | C | H | C | M | | G | P | E | |
| S2.53 | Y | H | K | W | | T | C | H | C | M | N | G | P | E | E |
| S2.54 | Y | H | K | W | | T | C | H | C | M | N | G | P | A | E |
| S2.55 | Y | H | K | W | G | T | C | H | C | M | N | G | P | E | E |
| S2.56 | Y | H | K | W | G | T | C | H | C | M | N | G | P | A | E |

TABLE 6E
Hybrid constructs. Mutations are indicated with reference to TadA*7.10.

| | TadA amino acid subsitutions | | | | | | | | | | | |
|---|---|---|---|---|---|---|---|---|---|---|---|---|
| | 76 | 82 | 109 | 111 | 119 | 122 | 123 | 147 | 149 | 154 | 166 | 167 |
| TadA*7.10 | I | V | A | T | D | H | Y | Y | F | Q | T | D |
| TadA*8e | | | S | R | N | N | | D | Y | | I | N |
| TadA*8.20 | Y | S | | | | | H | R | | R | | |
| TadA*8.17 | | S | | | | | | | | R | | |
| pNMG-B878 | Y | S | | | | | H | D | | R | | |
| pNMG-B879 | Y | S | | | | | H | R | Y | R | | |
| pNMG-B880 | Y | S | | | | | H | R | | R | I | |
| pNMG-B881 | Y | S | | | | | H | R | | R | | N |
| pNMG-B882 | Y | S | | | | | H | D | Y | R | I | N |
| pNMG-B883 | Y | S | | R | N | | H | R | | R | | |
| pNMG-B884 | Y | S | S | R | N | N | H | R | | R | | |
| pNMG-B885 | Y | S | S | | | | H | R | | R | | |
| pNMG-B886 | Y | S | | R | | | H | R | | R | | |
| pNMG-B887 | Y | S | | | N | | H | R | | R | | |
| pNMG-B888 | Y | S | | | | N | H | R | | R | | |
| pNMG-B889 | Y | S | S | R | | | H | R | | R | | |
| pNMG-B890 | Y | S | | | N | N | H | R | | R | | |
| pNMG-B891 | Y | S | S | R | N | N | H | D | Y | R | I | N |

TABLE 6F
Base editor variants. Mutations are indicated with reference to TadA*8.19/8.20.

| | AA positions: | | | | | | | | | | | | |
|---|---|---|---|---|---|---|---|---|---|---|---|---|---|
| | 17 | 27 | 48 | 49 | 76 | 82 | 84 | 118 | 142 | 147 | 149 | 166 | 167 |
| | ABE8.19m/8.20m | | | | | | | | | | | | |
| | T | E | A | I | Y/I | S | F | M | A | Y | F | T | D |
| 1.1 + 8e(B879) | | H | | | I | | M | | | | Y | | |
| 1.2 + 8e(B879) | | H | | K | I | | | | | | Y | | |
| 1.12 + 8e(B879) | A | H | | M | I | | | L | | | Y | | |
| 1.17 + 8e(B879) | A | | G | | | T | | | E | | Y | | |
| 1.18 + 8e(B879) | | G | | | | | | | | | Y | | |
| 1.19 + 8e(B879) | | G | | N | | | | | | | Y | | |
| 1.1 + 8e(B882) | | H | | | I | | M | | | D | Y | I | N |
| 1.2 + 8e(B882) | | H | | K | I | | | | | D | Y | I | N |
| 1.12 + 8e(B882) | A | H | | M | I | | | L | | D | Y | I | N |
| 1.17 + 8e(B882) | A | | G | | | T | | | E | D | Y | I | N |
| 1.18 + 8e(B882) | | G | | | | | | | | D | Y | I | N |
| 1.19 + 8e(B882) | | G | | N | | | | | | D | Y | I | N |

[0426] A TadA-derived cytidine deaminase (e.g., TadA-CD), according to certain embodiments, comprises an amino acid sequence that is at least 80% identical, at least 85% identical, at least 90% identical, at least 95% identical, at least 98% identical, at least 99% identical, and at least 99.5% identical to the amino acid sequence of SEQ ID NO: 652, wherein residue 27 of SEQ ID NO: 652 is any amino acid expect for E (glutamic acid). TadA-CDs with other sequence homologies are also possible. For example, in certain embodiments, the TadA-derived cytidine deaminase (e.g., TadA-CD) comprises an amino acid sequence that is at least 80% identical, at least 85% identical, at least 90% identical, at least 95% identical, at least 98% identical, at least 99% identical, and at least 99.5% identical to the amino acid sequence of SEQ ID NO: 652, wherein residue 28 of SEQ ID NO: 652 is any amino acid expect for V (valine). In another exemplary embodiment, the TadA-derived cytidine deaminase is at least 80% identical, at least 85% identical, at least 90% identical, at least 95% identical, at least 98% identical, at least 99% identical, and at least 99.5% identical to the amino acid sequence of SEQ ID NO: 652, wherein residue 96 of SEQ ID NO: 652 is any amino acid expect for H (histidine). In another exemplary embodiment, the TadA-derived cytidine deaminase is at least 80% identical, at least 85% identical, at least 90% identical, at least 95% identical, at least 98% identical, at least 99% identical, and at least 99.5% identical to the amino acid sequence of SEQ ID NO: 652, wherein residue 26 of SEQ ID NO: 652 is any amino acid expect for R (arginine). In various embodiments, the TadA-derived cytidine deaminase comprises an alteration at one or more of positions 26, 27, 28, 48, 73, or 96 compared to SEQ ID NO: 652.

[0427] As will be appreciated by those of skill in the art, TadA-derived cytidine deaminases (e.g., TadA-CD) may comprise a plurality of mutations relative to the parent adenosine deaminase (e.g., TadA-8e). In some embodiments, the deaminase of the instant application (e.g., TadA-CD) comprises mutations at residues E27, V28, and H96. In some embodiments, the disclosed deaminase further comprises at least one mutation at a residue selected from R26, M61, Y73, I76, M151, Q154, and A158, in the amino acid sequence of SEQ ID NO: 652, or corresponding mutations in a homologous adenosine deaminase.

[0428] In some embodiments, the deaminase comprises at least one mutation selected from E27A, E27K, V28G, V28A, and H96N, and further comprises at least one mutation at a residue selected from R26G, M61I, Y73H, Y73S, Y73C, I76F, M151I, Q154R, Q154H, and A158S, in the amino acid sequence of SEQ ID NO: 652, or a corresponding mutation in a homologous adenosine deaminase. Other mutations are also possible. For example, in certain embodiments, the TadA-CD enzyme comprises mutations selected from E27A, V28G, and H96N, and further comprises at least one mutation selected from R26G, M61I, Y73H, Y73S, Y73C, I76F, M151I, Q154R, Q154H, and A158S, in the amino acid sequence of SEQ ID NO: 652, or corresponding mutations in a homologous adenosine deaminase.

[0429] Other exemplary embodiments may include (1) deaminases comprising mutations E27K, V28G, and H96N, and further comprising at least one mutation selected from R26G, M61I, Y73H, Y73S, Y73C, I76F, M151I, Q154R, Q154H, and A158S, in the amino acid sequence of SEQ ID NO: 652 or corresponding mutations in a homologous adenosine deaminase; (2) deaminases comprising mutations E27A, V28A, and H96N, and further comprising at least one mutation selected from R26G, M61I, Y73H, Y73S, Y73C, I76F, M151I, Q154R, Q154H, and A158S, in the amino acid sequence of SEQ ID NO: 652, or corresponding mutations in a homologous adenosine deaminase; (3) deaminases comprising mutations E27K, V28A, and H96N, and further comprising at least one mutation selected from R26G, M61I, Y73H, Y73S, Y73C, I76F, M151I, Q154R, Q154H, and A158S, in the amino acid sequence of SEQ ID NO: 652, or corresponding mutations in a homologous adenosine deaminase.

[0430] In some embodiments, the TadA-derived cytidine deaminases (TadA-CD) comprise at least two mutations at residues selected from R26, M61, Y73, I76, M151, Q154, and A158 (relative to a reference adenosine deaminase). In other embodiments, the TadA-CD comprises at least two mutations at residues selected from R26G, M61I, Y73H, I76F, M151I, Q154H, Q154R, and A158S.

[0431] In some embodiments, the addition of a V106W mutation improves the selectivity by suppressing A deamination to a greater extent than C deamination.

[0432] In some embodiments, a TadA-based dual editor comprises an adenosine deaminase variant comprising one, two, three, four, or five mutations selected from R26G, V28A, A48R, Y73S, and H96N (e.g., SEQ ID NO: 658).

[0433] As such, in some embodiments, provided herein are deaminases that comprise mutations at residues R26, V28, A48, and Y73 in the amino acid sequence of SEQ ID NO: 652, or corresponding mutations in a homologous adenosine deaminase. Further provided herein are deaminases that comprise mutations at residues R26, E27, V28, A48, and Y73 (e.g., further comprise a mutation at E27) in the amino acid sequence of SEQ ID NO: 652. In particular embodiments, these deaminases comprise the mutations R26G, V28A, A48R, Y73S, and H96N. In some embodiments, these deaminases comprise the mutations R26G, V28G, A48R, and Y73C.

[0434] TadA-CD variants may comprise at least one mutation selected from R26G, E27A, V28G, I76F, H96N, and M151I (e.g, TadA-CDa, SEQ ID NO: 653); R26G, E27A, V28G, I76F, H96N, and A158S (e.g, TadA-CDb, SEQ ID NO: 654); R26G, E27A, V28G, I76F, H96N, Q154R, and A158S (e.g, TadA-CDc, SEQ ID NO: 655); E27A, V28G, Y73H, H96N, Q154H, and A158S (e.g., TadA-CDd, SEQ ID NO: 656); R26G, V28A, A48R, Y73S, and H96N (e.g., TadA-CDe, SEQ ID NO: 657); V28A, A48R, and Y73S (e.g, TadA-CDf, SEQ ID NO: 658), and R26G, V28G, A48R, and Y73C (e.g, TadA-CDg, SEQ ID NO: 659).

[0435] In some preferred embodiments, the deaminase comprises the mutations R26G, E27A, V28G, I76F, H96N, and A158S (e.g., TadA-CDa, SEQ ID NO: 653), R26G, E27A, V28G, I76F, H96N, Q154R, and A158S (e.g., TadA-CDb, SEQ ID NO: 654), R26G, E27A, V28G, I76F, H96N, and M151I (e.g., TadA-CDc, SEQ ID NO: 655), E27K, V28A, M61I, and H96N (e.g., TadA-CDd, SEQ ID NO: 656), E27A, V28G, Y73H, H96N, Q154H, and A158S (e.g., TadA-CDe, SEQ ID NO: 657), R26G, V28A, A48R, Y73S, and H96N (e.g., TadA-CDf, SEQ ID NO: 658), and R26G, V28G, A48R, and Y73C (e.g., TadA-CDg, SEQ ID NO: 659).

[0436] In some embodiments, the TadA-CD variants described above and herein may also comprises a V106W mutation.

[0437] In some embodiments, the TadA-CD variants comprise at least 80%, at least 85%, at least 90%, at least 95%, at least 98%, at least 99%, or at least 99.5% to any of the amino acid sequences of SEQ ID NOs: 652-659.

[0438] In some embodiments, the evolved TadA-Dual deaminase comprises the mutations R26G, V28A, N46I, A48R, Y73P, and H96N (TadA-CD-1, SEQ ID NO: 660) relative to the amino acid sequence of SEQ ID NO: 652. In some embodiments, the evolved TadA-Dual deaminase comprises the mutations R26G, V28A, N46T, A48R, Y73P, and H96N (TadA-CD-2, SEQ ID NO: 661) relative to the amino acid sequence of SEQ ID NO: 652. In some embodiments, the evolved TadA-Dual deaminase comprises the mutations R26G, V28A, N46T, A48R, Y73S, and H96N (TadA-CD-3, SEQ ID NO: 662) relative to the amino acid sequence of SEQ ID NO: 652. In some embodiments, the evolved TadA-Dual deaminase comprises the mutations R26G, V28A, N46V, A48R, Y73S, and H96N (TadA-CD-4, SEQ ID NO:663) relative to the amino acid sequence of SEQ ID NO: 652. In some embodiments, the evolved TadA-Dual deaminase comprises the mutations R26G, V28A, N46V, A48R, Y73P, and H96N (TadA-CD-5, SEQ ID NO: 664) relative to the amino acid sequence of SEQ ID NO: 652. In some embodiments, the evolved TadA-Dual deaminase comprises the mutations R26G, V28A, N46L, A48R, Y73P, and H96N (TadA-CD-6, SEQ ID NO: 665) relative to the amino acid sequence of SEQ ID NO: 652. In some embodiments, the evolved TadA-Dual deaminase comprises the mutations V28A, N46L, A48P, and Y73P (TadA-CD-7, SEQ ID NO: 666) relative to the amino acid sequence of SEQ ID NO: 652. In some embodiments, the evolved TadA-Dual deaminase comprises the mutations V28A, N46C, A48P, and Y73P (TadA-CD-8, SEQ ID NO: 667) relative to the amino acid sequence of SEQ ID NO: 652. In some embodiments, the evolved TadA-Dual deaminase comprises the mutations R26G, V28A, N46V, A48R, Y73P, and H96N (TadA-CD-9, SEQ ID NO: 668) relative to the amino acid sequence of SEQ ID NO: 652. In some embodiments, the evolved TadA-Dual deaminase comprises the mutations R26G, V28A, N46V, A48R, Q71H, Y73P, and H96N (TadA-CD-10, SEQ ID NO: 669) relative to the amino acid sequence of SEQ ID NO: 652. In some embodiments, the evolved TadA-Dual deaminase comprises the mutations R26G, V28A, N46L, A48R, Y73P, and H96N (TadA-CD-11, SEQ ID NO: 670) relative to the amino acid sequence of SEQ ID NO: 652. In some embodiments, the evolved TadA-Dual deaminase comprises the mutations R26G, V28A, N46C, A48R, Y73P, and H96N (TadA-CD-12, SEQ ID NO: 671) relative to the amino acid sequence of SEQ ID NO: 652. In some embodiments, the evolved TadA-Dual deaminase comprises the mutations R26G, V28A, N46C, A48R, Y73P, H96N, and A162V (TadA-CD-13, SEQ ID NO: 672) relative to the amino acid sequence of SEQ ID NO: 652.

[0439] In some embodiments, the evolved TadA-Dual deaminase comprises the mutations R26G, V28A, N46I, A48R, Y73S, and H96N (TadA-CD-14, SEQ ID NO: 673) relative to the amino acid sequence of SEQ ID NO: 652. In some embodiments, the evolved TadA-Dual deaminase comprises the mutations R26G, V28A, A48R, Q71S, Y73S, and H96N (TadA-CD-15, SEQ ID NO: 674) relative to the amino acid sequence of SEQ ID NO: 652. In some embodiments, the evolved TadA-Dual deaminase comprises the mutations R26G, V28A, N46L, A48R, and Y73P (TadA-CD-16, SEQ ID NO: 675) relative to the amino acid sequence of SEQ ID NO: 652. In some embodiments, the evolved TadA-Dual deaminase comprises the mutations R26G, V28A, N46L, A48R, Y73P, and H96N (TadA-CD-17, SEQ ID NO: 676) relative to the amino acid sequence of SEQ ID NO: 652. In some embodiments, the evolved TadA-Dual deaminase comprises the mutations R26G, V28A, Y73P, and H96N (TadA-CD-18, SEQ ID NO: 677) relative to the amino acid sequence of SEQ ID NO: 652. In some embodiments, the evolved TadA-Dual deaminase comprises the mutations R26G, V28A, N46V, A48R, Y73S, and H96N (TadA-CD-19, SEQ ID NO: 678) relative to the amino acid sequence of SEQ ID NO: 652. In some embodiments, the evolved TadA-Dual deaminase comprises the mutations R26G, V28A, N46V, A48R, Y73P, and H96N (TadA-CD-20, SEQ ID NO: 679) relative to the amino acid sequence of SEQ ID NO: 652. In some embodiments, the evolved TadA-Dual deaminase comprises the mutations R26G and N46L (TadA-CD-21, SEQ ID NO: 680) relative to the amino acid sequence of SEQ ID NO: 652. In some embodiments, the evolved TadA-Dual deaminase comprises the mutations R26G, V28A, N46I, A48R, Y73P, and H96N (TadA-CD-22, SEQ ID NO: 681) relative to the amino acid sequence of SEQ ID NO: 652. In some embodiments, the evolved TadA-Dual deaminase comprises the mutations R26G, V28A, N46V, A48R, Y73P, and H96N (TadA-CD-23, SEQ ID NO: 682) relative to the amino acid sequence of SEQ ID NO: 652. In some embodiments, the evolved TadA-Dual deaminase comprises the mutations R26G, V28A, A48P, Y73H, T79P, and H96N (TadA-CD-24, SEQ ID NO: 683) relative to the amino acid sequence of SEQ ID NO: 652. In some embodiments, the evolved TadA-Dual deaminase comprises the mutations R26G, N46I, and H96N (TadA-CD-25, SEQ ID NO: 684) relative to the amino acid sequence of SEQ ID NO: 652.

[0440] In some embodiments, the evolved TadA-Dual deaminase comprises the mutations R26G, V28A, N46V, A48R, Y73P, and H96N (TadA-CD-26, SEQ ID NO: 685) relative to the amino acid sequence of SEQ ID NO: 652. In some embodiments, the evolved TadA-Dual deaminase comprises the mutations R26G, V28A, N46L, A48R, Y73S, and H96N (TadA-CD-27, SEQ ID NO: 686) relative to the amino acid sequence of SEQ ID NO: 652. In some embodiments, the evolved TadA-Dual deaminase comprises the mutations R26G, V28A, N46C, A48R, H96N, and A162V (TadA-CD-28, SEQ ID NO: 687) relative to the amino acid sequence of SEQ ID NO: 652. In some embodiments, the evolved TadA-Dual deaminase comprises the mutations R26G, V28A, N46V, A48R, Q71H, Y73P, and H96N (TadA-CD-29, SEQ ID NO: 688) relative to the amino acid sequence of SEQ ID NO: 652. In some embodiments, the evolved TadA-Dual deaminase comprises the mutations R26G, V28A, N46C, A48R, Y73P, and H96N (TadA-CD-30, SEQ ID NO: 689) relative to the amino acid sequence of SEQ ID NO: 652. In some embodiments, the evolved TadA-Dual deaminase comprises the mutations R26G, V28A, N46C, A48R, Y73P, H96N, and A162V (TadA-CD-31, SEQ ID NO: 690) relative to the amino acid sequence of SEQ ID NO: 652.

[0441] In some embodiments, the evolved TadA-Dual deaminase comprises the mutations R26G, V28A, N46V, A48R, Y73P, and H96N (TadA-CD-32, SEQ ID NO: 691) relative to the amino acid sequence of SEQ ID NO: 652. In some embodiments, the evolved TadA-Dual deaminase comprises the mutations R26G, V28A, N46V, A48R, Y73S, and H96N (TadA-CD-33, SEQ ID NO: 692) relative to the amino acid sequence of SEQ ID NO: 652. In some embodiments, the evolved TadA-Dual deaminase comprises the mutations R26G, V28A, N46V, A48P, Y73S, and H96N (TadA-CD-34, SEQ ID NO: 693) relative to the amino acid sequence of SEQ ID NO: 652. In some embodiments, the evolved TadA-Dual deaminase comprises the mutations R26G, V28A, N46C, A48R, Y73P, and H96N (TadA-CD-35, SEQ ID NO: 694) relative to the amino acid sequence of SEQ ID NO: 652. In some embodiments, the evolved TadA-Dual deaminase comprises the mutations R26G, V28A, L34M, N46L, A48R, Y73P, and H96N (TadA-CD-36, SEQ ID NO: 695) relative to the amino acid sequence of SEQ ID NO: 652.

[0442] In some embodiments, the evolved TadA-Dual deaminase comprises the mutations R26G, V28A, N46L, A48R, Y73P, and H96N (TadA-CD-37, SEQ ID NO: 696) relative to the amino acid sequence of SEQ ID NO: 652. In some embodiments, the evolved TadA-Dual deaminase comprises the mutations R26G, V28A, N46L, A48P, R64K, Y73P, and H96N (TadA-CD-38, SEQ ID NO: 697) relative to the amino acid sequence of SEQ ID NO: 652.

[0443] In some embodiments, the evolved TadA-Dual deaminase comprises the mutations N46I, S73P, and H154Q (TadA-CD-1, SEQ ID NO: 660) relative to the amino acid sequence of SEQ ID NO: 658. In some embodiments, the evolved TadA-Dual deaminase comprises the mutations N46T (TadA-CD-2, SEQ ID NO: 661) relative to the amino acid sequence of SEQ ID NO: 658. In some embodiments, the evolved TadA-Dual deaminase comprises the mutations N46T and H154Q (TadA-CD-3, SEQ ID NO: 662) relative to the amino acid sequence of SEQ ID NO: 658. In some embodiments, the evolved TadA-Dual deaminase comprises the mutations N46V and H154Q (TadA-CD-4, SEQ ID NO: 663) relative to the amino acid sequence of SEQ ID NO: 658. In some embodiments, the evolved TadA-Dual deaminase comprises the mutations N46V, S73P, G105S, and H154Q (TadA-CD-5, SEQ ID NO: 664) relative to the amino acid sequence of SEQ ID NO: 658. In some embodiments, the evolved TadA-Dual deaminase comprises the mutations N46L, S73P, and H154Q (TadA-CD-6, SEQ ID NO: 665) relative to the amino acid sequence of SEQ ID NO: 658. In some embodiments, the evolved TadA-Dual deaminase comprises the mutations G26R N46L, R48P, S73P, N96H, and H154Q (TadA-CD-7, SEQ ID NO: 666) relative to the amino acid sequence of SEQ ID NO: 658. In some embodiments, the evolved TadA-Dual deaminase comprises the mutations N46C, N96H, and H154Q (TadA-CD-8, SEQ ID NO: 667) relative to the amino acid sequence of SEQ ID NO: 658. In some embodiments, the evolved TadA-Dual deaminase comprises the mutations N46V, S73P, and H154Q (TadA-CD-9, SEQ ID NO: 668) relative to the amino acid sequence of SEQ ID NO: 658. In some embodiments, the evolved TadA-Dual deaminase comprises the mutations N46V, Q71H, S73P, and H154Q (TadA-CD-10, SEQ ID NO: 669) relative to the amino acid sequence of SEQ ID NO: 658. In some embodiments, the evolved TadA-Dual deaminase comprises the mutations N46L and H154Q (TadA-CD-11, SEQ ID NO: 670) relative to the amino acid sequence of SEQ ID NO: 658. In some embodiments, the evolved TadA-Dual deaminase comprises the mutations N46C, S73P, and H154Q (TadA-CD-12, SEQ ID NO: 671) relative to the amino acid sequence of SEQ ID NO: 658. In some embodiments, the evolved TadA-Dual deaminase comprises the mutations N46C, S73P, H154Q, and A162V (TadA-CD-13, SEQ ID NO: 672) relative to the amino acid sequence of SEQ ID NO: 658.

[0444] In some embodiments, the evolved TadA-Dual deaminase comprises the mutations N46I and H154Q (TadA-CD-14, SEQ ID NO: 673) relative to the amino acid sequence of SEQ ID NO: 658. In some embodiments, the evolved TadA-Dual deaminase comprises the mutations Q71S and H154Q (TadA-CD-15, SEQ ID NO: 674) relative to the amino acid sequence of SEQ ID NO: 652. In some embodiments, the evolved TadA-Dual deaminase comprises the mutations N46L, S73P, N79T, and N96H (TadA-CD-16, SEQ ID NO: 675) relative to the amino acid sequence of SEQ ID NO: 658. In some embodiments, the evolved TadA-Dual deaminase comprises the mutations N46L, S73P, N79T (TadA-CD-17, SEQ ID NO: 676) relative to the amino acid sequence of SEQ ID NO: 658. In some embodiments, the evolved TadA-Dual deaminase comprises the mutations R48A, S73P, and N79T (TadA-CD-18, SEQ ID NO: 677) relative to the amino acid sequence of SEQ ID NO: 658. In some embodiments, the evolved TadA-Dual deaminase comprises the mutations N46V and N79T (TadA-CD-19, SEQ ID NO: 678) relative to the amino acid sequence of SEQ ID NO: 658. In some embodiments, the evolved TadA-Dual deaminase comprises the mutations N46V, S73P, and N79T (TadA-CD-20, SEQ ID NO: 679) relative to the amino acid sequence of SEQ ID NO: 658. In some embodiments, the evolved TadA-Dual deaminase comprises the mutations A28V, N46L, R48A, S73Y, N79T, and N96H (TadA-CD-21, SEQ ID NO: 680) relative to the amino acid sequence of SEQ ID NO: 658. In some embodiments, the evolved TadA-Dual deaminase comprises the mutations N46I, S73P, and N79T (TadA-CD-22, SEQ ID NO: 681) relative to the amino acid sequence of SEQ ID NO: 658. In some embodiments, the evolved TadA-Dual deaminase comprises the mutations N46V, S73P, N79T, and G106S (TadA-CD-23, SEQ ID NO: 682) relative to the amino acid sequence of SEQ ID NO: 658. In some embodiments, the evolved TadA-Dual deaminase comprises the mutations R48P, S73H, and N79P (TadA-CD-24, SEQ ID NO: 683) relative to the amino acid sequence of SEQ ID NO: 658. In some embodiments, the evolved TadA-Dual deaminase comprises the mutations A28V, N46I, R48A, S73Y, and N79T (TadA-CD-25, SEQ ID NO: 684) relative to the amino acid sequence of SEQ ID NO: 658.

[0445] In some embodiments, the evolved TadA-Dual deaminase comprises the mutations N46V and S73P (TadA-CD-26, SEQ ID NO: 685) relative to the amino acid sequence of SEQ ID NO: 658. In some embodiments, the evolved TadA-Dual deaminase comprises the mutation N46L (TadA-CD-27, SEQ ID NO: 686) relative to the amino acid sequence of SEQ ID NO: 658. In some embodiments, the evolved TadA-Dual deaminase comprises the mutations N46C, S73Y, and A162V (TadA-CD-28, SEQ ID NO: 687) relative to the amino acid sequence of SEQ ID NO: 658. In some embodiments, the evolved TadA-Dual deaminase comprises the mutations N46V, Q71H, and S73P (TadA-CD-29, SEQ ID NO: 688) relative to the amino acid sequence of SEQ ID NO: 658. In some embodiments, the evolved TadA-Dual deaminase comprises the mutations N46C and S73P (TadA-CD-30, SEQ ID NO: 689) relative to the amino acid sequence of SEQ ID NO: 658. In some embodiments, the evolved TadA-Dual deaminase comprises the mutations N46C, S73P, and A162V (TadA-CD-31, SEQ ID NO: 690) relative to the amino acid sequence of SEQ ID NO: 658. In some embodiments, the evolved TadA-Dual deaminase comprises the mutations N46V and S73P (TadA-CD-32, SEQ ID NO: 691) relative to the amino acid sequence of SEQ ID NO: 658. In some embodiments, the evolved TadA-Dual deaminase comprises the mutation N46V (TadA-CD-33, SEQ ID NO: 692) relative to the amino acid sequence of SEQ ID NO: 658. In some embodiments, the evolved TadA-Dual deaminase comprises the mutations N46V and R48P (TadA-CD-34, SEQ ID NO: 693) relative to the amino acid sequence of SEQ ID NO: 658. In some embodiments, the evolved TadA-Dual deaminase comprises the mutations N46CV and S73P (TadA-CD-35, SEQ ID NO: 694) relative to the amino acid sequence of SEQ ID NO: 658. In some embodiments, the evolved TadA-Dual deaminase comprises the mutations L34M, N46L and S73P (TadA-CD-36, SEQ ID NO: 695) relative to the amino acid sequence of SEQ ID NO: 658. In some embodiments, the evolved TadA-Dual deaminase comprises the mutations N46L and S73P (TadA-CD-37, SEQ ID NO: 696) relative to the amino acid sequence of SEQ ID NO: 658. In some embodiments, the evolved TadA-Dual deaminase comprises the mutations N46L, r48P, R64K and S73P (TadA-CD-38, SEQ ID NO: 697) relative to the amino acid sequence of SEQ ID NO: 658.

[0446] In some embodiments, the TadA-CDs evolved from TadA-dual comprise at least 80%, 85%, 90%, 95%, 98%, 99%, or 99.5% identical to any of the amino acid sequences of SEQ ID NOs: 39, 41-54, and 359-383.

[0447] Exemplary TadA-derived cytosine base editor amino acid sequences include: TadA-CDa base editor (SpCas9n napDNAbp domain) (TadCBEa) (SEQ ID NO: 698), TadA-CDb base editor (SpCas9n napDNAbp domain) (TadCBEb) (SEQ ID NO: 699), TadA-CDe base editor (SpCas9n napDNAbp domain) (TadCBEc) (SEQ ID NO: 700), TadA-CDd base editor (SpCas9n napDNAbp domain) (TadCBEd) (SEQ ID NO: 701), TadA-CDe base editor (SpCas9n napDNAbp domain) (TadCBEe) (SEQ ID NO: 702), TadA-CDa (V106W) base editor (SpCas9n napDNAbp domain) (TadCBEa (V106W)) (SEQ ID NO: 703), TadA-CDd (V106W) base editor (SpCas9n napDNAbp domain) (TadCBEd (V106W)) (SEQ ID NO: 704), TadA-CDf base editor (SpCas9n napDNAbp domain) (TadCBEf) (SEQ ID NO: 705), TadA-CDg base editor (SpCas9n napDNAbp domain) (TadCBEg) (SEQ ID NO: 706), TadA-CDa: eNme2Cas9 base editor (SEQ ID NO: 707), TadA-CDa: SaCas9 base editor (SEQ ID NO: 708), TadA-CDa: SpCas9-NG base editor (SEQ ID NO: 709), TadA-CDa: enCjCas9 base editor (SEQ ID NO: 710).

[0448] Exemplary polynucleotides encoding TadA-derived cytosine base editors of the disclosure include: TadCBEa-eNme2-C-BE4max vector (SEQ ID NO: 711), TadCBEa-enCjCas9-BE4max vector (SEQ ID NO: 712), TadCBEa-SpCas9-BE4max vector (SEQ ID NO: 713), TadCBEa-SaCas9-BE4max vector (SEQ ID NO: 714), TadCBEa-SpCas9-NG-BE4max vector (SEQ ID NO: 715).

### Guide Polynucleotides

[0449] A polynucleotide programmable nucleotide binding domain, when in conjunction with a bound guide polynucleotide (e.g., gRNA), can specifically bind to a target polynucleotide sequence (i.e., via complementary base pairing between bases of the bound guide nucleic acid and bases of the target polynucleotide sequence) and thereby localize the base editor to the target nucleic acid sequence desired to be edited. In some embodiments, the target polynucleotide sequence comprises single-stranded DNA or double-stranded DNA. In some embodiments, the target polynucleotide sequence comprises RNA. In some embodiments, the target polynucleotide sequence comprises a DNA-RNA hybrid.

[0450] In an embodiment, a guide polynucleotide described herein can be RNA or DNA. In one embodiment, the guide polynucleotide is a gRNA.

[0451] In some embodiments, the guide polynucleotide is at least one single guide RNA (“sgRNA” or “gRNA”). In some embodiments, a guide polynucleotide comprises two or more individual polynucleotides, which can interact with one another via for example complementary base pairing (e.g., a dual guide polynucleotide, dual gRNA). For example, a guide polynucleotide can comprise a CRISPR RNA (crRNA) and a trans-activating CRISPR RNA (tracrRNA) or can comprise one or more trans-activating CRISPR RNA (tracrRNA).

[0452] A guide polynucleotide may include natural or non-natural (or unnatural) nucleotides (e.g., peptide nucleic acid or nucleotide analogs). In some cases, the targeting region of a guide nucleic acid sequence (e.g., a spacer) can be at least 15, 16, 17, 18, 19, 20, 21, 22, 23, 24, 25, 26, 27, 28, 29, or 30 nucleotides in length.

[0453] In some embodiments, the methods described herein can utilize an engineered Cas protein. A guide RNA (gRNA) is a short synthetic RNA composed of a scaffold sequence necessary for Cas-binding and a user-defined ˜20 nucleotide spacer that defines the genomic target to be modified. Exemplary gRNA scaffold sequences are provided in the sequence listing as SEQ ID NOs: 317-327 and 425. Thus, a skilled artisan can change the genomic target of the Cas protein specificity is partially determined by how specific the gRNA targeting sequence is for the genomic target compared to the rest of the genome. In embodiments, the spacer is about 10, 11, 12, 13, 14, 15, 16, 17, 18, 19, 20, 22, 23, 24, 25, or more nucleotides in length. The spacer of a gRNA can be or can be about 19, 20, or 21 nucleotides in length.

[0454] A gRNA or a guide polynucleotide can target any exon or intron of a gene target. In some embodiments, a composition comprises multiple gRNAs that all target the same exon or multiple gRNAs that target different exons. An exon and/or an intron of a gene can be targeted. A gRNA or a guide polynucleotide can target a nucleic acid sequence of about 20 nucleotides or less than about 20 nucleotides (e.g., at least about 5, 10, 15, 16, 17, 18, 19, 20, 21, 22, 23, 24, 25, 30 nucleotides), or anywhere between about 1-100 nucleotides (e.g., 5, 10, 15, 16, 17, 18, 19, 20, 21, 22, 23, 24, 25, 30, 40, 50, 60, 70, 80, 90, 100). A target nucleic acid sequence can be or can be about 20 bases immediately 5′ of the first nucleotide of the PAM. A gRNA can target a nucleic acid sequence. A target nucleic acid can be at least or at least about 1-10, 1-20, 1-30, 1-40, 1-50, 1-60, 1-70, 1-80, 1-90, or 1-100 nucleotides.

[0455] The guide polynucleotides can comprise standard ribonucleotides, modified ribonucleotides (e.g., pseudouridine), ribonucleotide isomers, and/or ribonucleotide analogs.

[0456] In some embodiments, a base editor system may comprise multiple guide polynucleotides, e.g., gRNAs. For example, the gRNAs may target to one or more target loci (e.g., at least 1 gRNA, at least 2 gRNA, at least 5 gRNA, at least 10 gRNA, at least 20 gRNA, at least 30 g RNA, at least 50 gRNA) comprised in a base editor system. The multiple gRNA sequences can be tandemly arranged and may be separated by a direct repeat.

### Modified Polynucleotides

[0457] To enhance expression, stability, and/or genomic/base editing efficiency, and/or reduce possible toxicity, the base editor-coding sequence (e.g., mRNA) and/or the guide polynucleotide (e.g., gRNA) can be modified to include one or more modified nucleotides and/or chemical modifications, e.g. using pseudo-uridine, 5-Methyl-cytosine, 2′-O-methyl-3′-phosphonoacetate, 2′-O-methyl thioPACE (MSP), 2′-O-methyl-PACE (MP), 2′-fluoro RNA (2′-F-RNA), =constrained ethyl (S-cEt), 2′-O-methyl (‘M’), 2′-O-methyl-3′-phosphorothioate (‘MS’), 2′-O-methyl-3′-thiophosphonoacetate (‘MSP’), 5-methoxyuridine, phosphorothioate, and N1-Methylpseudouridine. Chemically protected gRNAs can enhance stability and editing efficiency in vivo and ex vivo. Methods for using chemically modified mRNAs and guide RNAs are known in the art and described, for example, by Jiang et al., Chemical modifications of adenine base editor mRNA and guide RNA expand its application scope. Nat Commun 11, 1979 (2020). doi.org/10.1038/s41467-020-15892-8, Callum et al., N1-Methylpseudouridine substitution enhances the performance of synthetic mRNA switches in cells, Nucleic Acids Research, Volume 48, Issue 6, 6 Apr. 2020, Page e35, and Andries et al., Journal of Controlled Release, Volume 217, 10 Nov. 2015, Pages 337-344, each of which is incorporated herein by reference in its entirety.

[0458] In some embodiments, the guide polynucleotide comprises one or more modified nucleotides at the 5′ end and/or the 3′ end of the guide. In some embodiments, the guide polynucleotide comprises two, three, four or more modified nucleosides at the 5′ end and/or the 3′ end of the guide. In some embodiments, the guide polynucleotide comprises two, three, four or more modified nucleosides at the 5′ end and/or the 3′ end of the guide.

[0459] In some embodiments, the guide comprises at least about 50%-75% modified nucleotides. In some embodiments, the guide comprises at least about 85% or more modified nucleotides. In some embodiments, at least about 1-5 nucleotides at the 5′ end of the gRNA are modified and at least about 1-5 nucleotides at the 3′ end of the gRNA are modified. In some embodiments, at least about 3-5 contiguous nucleotides at each of the 5′ and 3′ termini of the gRNA are modified. In some embodiments, at least about 20% of the nucleotides present in a direct repeat or anti-direct repeat are modified. In some embodiments, at least about 50% of the nucleotides present in a direct repeat or anti-direct repeat are modified. In some embodiments, at least about 50-75% of the nucleotides present in a direct repeat or anti-direct repeat are modified. In some embodiments, at least about 100 of the nucleotides present in a direct repeat or anti-direct repeat are modified. In some embodiments, at least about 20% or more of the nucleotides present in a hairpin present in the gRNA scaffold are modified. In some embodiments, at least about 50% or more of the nucleotides present in a hairpin present in the gRNA scaffold are modified. In some embodiments, the guide comprises a variable length spacer. In some embodiments, the guide comprises a 20-40 nucleotide spacer. In some embodiments, the guide comprises a spacer comprising at least about 20-25 nucleotides or at least about 30-35 nucleotides. In some embodiments, the spacer comprises modified nucleotides. In some embodiments, the guide comprises two or more of the following:
[0460] at least about 1-5 nucleotides at the 5′ end of the gRNA are modified and at least about 1-5 nucleotides at the 3′ end of the gRNA are modified;
[0461] at least about 20% of the nucleotides present in a direct repeat or anti-direct repeat are modified;
[0462] at least about 50-75% of the nucleotides present in a direct repeat or anti-direct repeat are modified;
[0463] at least about 20% or more of the nucleotides present in a hairpin present in the gRNA scaffold are modified;
[0464] a variable length spacer; and
[0465] a spacer comprising modified nucleotides.

[0466] In embodiments, the gRNA contains numerous modified nucleotides and/or chemical modifications. Such modifications can increase base editing ˜2 fold in vivo or in vitro. In embodiments, the gRNA comprises 2′-O-methyl or phosphorothioate modifications. In an embodiment, the gRNA comprises 2′-O-methyl and phosphorothioate modifications. In an embodiment, the modifications increase base editing by at least about 2 fold.

[0467] A guide polynucleotide can comprise one or more modifications to provide a nucleic acid with a new or enhanced feature. A guide polynucleotide can comprise a nucleic acid affinity tag. A guide polynucleotide can comprise synthetic nucleotide, synthetic nucleotide analog, nucleotide derivatives, and/or modified nucleotides.

[0468] A gRNA or a guide polynucleotide can also be modified by 5′ adenylate, 5′ guanosine-triphosphate cap, 5′ N7-Methylguanosine-triphosphate cap, 5′ triphosphate cap, 3′ phosphate, 3′ thiophosphate, 5′ phosphate, 5′ thiophosphate, Cis-Syn thymidine dimer, trimers, C12 spacer, C3 spacer, C6 spacer, dSpacer, PC spacer, rSpacer, Spacer 18, Spacer 9, 3′-3′ modifications, 2′-O-methyl thioPACE (MSP), 2′-O-methyl-PACE (MP), and constrained ethyl (S-cEt), 5′-5′ modifications, abasic, acridine, azobenzene, biotin, biotin BB, biotin TEG, cholesteryl TEG, desthiobiotin TEG, DNP TEG, DNP-X, DOTA, dT-Biotin, dual biotin, PC biotin, psoralen C2, psoralen C6, TINA, 3′ DABCYL, black hole quencher 1, black hole quencher 2, DABCYL SE, dT-DABCYL, IRDye QC-1, QSY-21, QSY-35, QSY-7, QSY-9, carboxyl linker, thiol linkers, 2′-deoxyribonucleoside analog purine, 2′-deoxyribonucleoside analog pyrimidine, ribonucleoside analog, 2′-O-methyl ribonucleoside analog, sugar modified analogs, wobble/universal bases, fluorescent dye label, 2′-fluoro RNA, 2′-O-methyl RNA, methylphosphonate, phosphodiester DNA, phosphodiester RNA, phosphothioate DNA, phosphorothioate RNA, UNA, pseudouridine-5′-triphosphate, 5′-methylcytidine-5′-triphosphate, or any combination thereof.

[0469] In some cases, a phosphorothioate enhanced RNA gRNA can inhibit RNase A, RNase T1, calf serum nucleases, or any combinations thereof. These properties can allow the use of PS-RNA gRNAs to be used in applications where exposure to nucleases is of high probability in vivo or in vitro. For example, phosphorothioate (PS) bonds can be introduced between the last 3-5 nucleotides at the 5′- or 3′-end of a gRNA which can inhibit exonuclease degradation. In some cases, phosphorothioate bonds can be added throughout an entire gRNA to reduce attack by endonucleases.

### Fusion Proteins or Complexes Comprising a Nuclear Localization Sequence (NLS)

[0470] In some embodiments, the fusion proteins or complexes provided herein further comprise one or more (e.g., 2, 3, 4, 5) nuclear targeting sequences, for example a nuclear localization sequence (NLS). In one embodiment, a bipartite NLS is used. In some embodiments, a NLS comprises an amino acid sequence that facilitates the importation of a protein, that comprises an NLS, into the cell nucleus (e.g., by nuclear transport). In some embodiments, the NLS is fused to the N-terminus or the C-terminus of the fusion protein. In some embodiments, the NLS is fused to the C-terminus or N-terminus of an nCas9 domain or a dCas9 domain. In some embodiments, the NLS is fused to the N-terminus or C-terminus of the Cas12 domain. In some embodiments, the NLS is fused to the N-terminus or C-terminus of the cytidine or adenosine deaminase. In some embodiments, the NLS is fused to the fusion protein via one or more linkers. In some embodiments, the NLS is fused to the fusion protein without a linker. In some embodiments, the NLS comprises an amino acid sequence of any one of the NLS sequences provided or referenced herein. Additional nuclear localization sequences are known in the art and would be apparent to the skilled artisan. For example, NLS sequences are described in Plank et al., PCT/EP2000/011690, the contents of which are incorporated herein by reference for their disclosure of exemplary nuclear localization sequences.

[0471] In some embodiments, the NLS is present in a linker or the NLS is flanked by linkers, for example described herein. A bipartite NLS comprises two basic amino acid clusters, which are separated by a relatively short spacer sequence (hence bipartite-2 parts, while monopartite NLSs are not). The NLS of nucleoplasmin, KR[PAATKKAGQA]KKK (SEQ ID NO: 191), is the prototype of the ubiquitous bipartite signal: two clusters of basic amino acids, separated by a spacer of about 10 amino acids. The sequence of an exemplary bipartite NLS follows:

(SEQ ID NO: 328)
PKKKRKVEGADKRTADGSEFESPKKKRKV.

[0472] In some embodiments, any of the fusion proteins or complexes provided herein comprise an NLS comprising the amino acid sequence EGADKRTADGSEFESPKKKRKV (amino acids 8 to 29 of SEQ ID NO 328). In some embodiments, any of the adenosine base editors provided herein comprise an NLS comprising the amino acid sequence EGADKRTADGSEFESPKKKRKV (amino acids 8 to 29 of SEQ ID NO: 328). In some embodiments, the NLS is at a C-terminal portion of the adenosine base editor. In some embodiments, the NLS is at the C-terminus of the adenosine base editor.

### Additional Domains

[0473] A base editor described herein can include any domain which helps to facilitate the nucleobase editing, modification or altering of a nucleobase of a polynucleotide. In some embodiments, a base editor comprises a polynucleotide programmable nucleotide binding domain (e.g., Cas9), a nucleobase editing domain (e.g., deaminase domain), and one or more additional domains. In some embodiments, the additional domain can facilitate enzymatic or catalytic functions of the base editor, binding functions of the base editor, or be inhibitors of cellular machinery (e.g., enzymes) that could interfere with the desired base editing result. In some embodiments, a base editor comprises a nuclease, a nickase, a recombinase, a deaminase, a methyltransferase, a methylase, an acetylase, an acetyltransferase, a transcriptional activator, or a transcriptional repressor domain.

[0474] In some embodiments, a base editor comprises an uracil glycosylase inhibitor (UGI) domain. In some cases, a base editor is expressed in a cell in trans with a UGI polypeptide. In some embodiments, cellular DNA repair response to the presence of U:G heteroduplex DNA can be responsible for a reduction in nucleobase editing efficiency in cells. In such embodiments, uracil DNA glycosylase (UDG) can catalyze removal of U from DNA in cells, which can initiate base excision repair (BER), mostly resulting in reversion of the U:G pair to a C:G pair. In such embodiments, BER can be inhibited in base editors comprising one or more domains that bind the single strand, block the edited base, inhibit UGI, inhibit BER, protect the edited base, and/or promote repairing of the non-edited strand. Thus, this disclosure contemplates a base editor fusion protein or complex comprising a UGI domain and/or a uracil stabilizing protein (USP) domain.

### Base Editor System

[0475] Provided herein are systems, compositions, and methods for editing a nucleobase using a base editor system. In some embodiments, the base editor system comprises (1) a base editor (BE) comprising a polynucleotide programmable nucleotide binding domain and a nucleobase editing domain (e.g., a deaminase domain) for editing the nucleobase; and (2) a guide polynucleotide (e.g., guide RNA) in conjunction with the polynucleotide programmable nucleotide binding domain. In some embodiments, the base editor system is a cytidine base editor (CBE) or an adenosine base editor (ABE). In some embodiments, the polynucleotide programmable nucleotide binding domain is a polynucleotide programmable DNA or RNA binding domain. In some embodiments, the nucleobase editing domain is a deaminase domain. In some embodiments, a deaminase domain can be a cytidine deaminase or an cytosine deaminase. In some embodiments, a deaminase domain can be an adenine deaminase or an adenosine deaminase. In some embodiments, the adenosine base editor can deaminate adenine in DNA. In some embodiments, the base editor is capable of deaminating a cytidine in DNA.

[0476] Use of the base editor system provided herein comprises the steps of: (a) contacting a target nucleotide sequence of a polynucleotide (e.g., double- or single stranded DNA or RNA) of a subject with a base editor system comprising a nucleobase editor (e.g., an adenosine base editor or a cytidine base editor) and a guide polynucleotide (e.g., gRNA), wherein the target nucleotide sequence comprises a targeted nucleobase pair; (b) inducing strand separation of said target region; (c) converting a first nucleobase of said target nucleobase pair in a single strand of the target region to a second nucleobase; and (d) cutting no more than one strand of said target region, where a third nucleobase complementary to the first nucleobase base is replaced by a fourth nucleobase complementary to the second nucleobase. It should be appreciated that in some embodiments, step (b) is omitted. In some embodiments, said targeted nucleobase pair is a plurality of nucleobase pairs in one or more genes. In some embodiments, the base editor system provided herein is capable of multiplex editing of a plurality of nucleobase pairs in one or more genes. In some embodiments, the plurality of nucleobase pairs is located in the same gene. In some embodiments, the plurality of nucleobase pairs is located in one or more genes, wherein at least one gene is located in a different locus.

[0477] The components of a base editor system (e.g., a deaminase domain, a guide RNA, and/or a polynucleotide programmable nucleotide binding domain) may be associated with each other covalently or non-covalently. For example, in some embodiments, the deaminase domain can be targeted to a target nucleotide sequence by a polynucleotide programmable nucleotide binding domain, optionally where the polynucleotide programmable nucleotide binding domain is complexed with a polynucleotide (e.g., a guide RNA). In some embodiments, a polynucleotide programmable nucleotide binding domain can be fused or linked to a deaminase domain. In some embodiments, a polynucleotide programmable nucleotide binding domain can target a deaminase domain to a target nucleotide sequence by non-covalently interacting with or associating with the deaminase domain. For example, in some embodiments, the nucleobase editing component (e.g., the deaminase component) comprises an additional heterologous portion or domain that is capable of interacting with, associating with, or capable of forming a complex with a corresponding heterologous portion, antigen, or domain that is part of a polynucleotide programmable nucleotide binding domain and/or a guide polynucleotide (e.g., a guide RNA) complexed therewith. In some embodiments, the polynucleotide programmable nucleotide binding domain, and/or a guide polynucleotide (e.g., a guide RNA) complexed therewith, comprises an additional heterologous portion or domain that is capable of interacting with, associating with, or capable of forming a complex with a corresponding heterologous portion, antigen, or domain that is part of a nucleobase editing domain (e.g., the deaminase component). In some embodiments, the additional heterologous portion may be capable of binding to, interacting with, associating with, or forming a complex with a polypeptide. In some embodiments, the additional heterologous portion may be capable of binding to, interacting with, associating with, or forming a complex with a polynucleotide. In some embodiments, the additional heterologous portion may be capable of binding to a guide polynucleotide. In some embodiments, the additional heterologous portion may be capable of binding to a polypeptide linker. In some embodiments, the additional heterologous portion is capable of binding to a polynucleotide linker. An additional heterologous portion may be a protein domain. In some embodiments, an additional heterologous portion comprises a polypeptide, such as a 22 amino acid RNA-binding domain of the lambda bacteriophage antiterminator protein N (N22p), a 2G12 IgG homodimer domain, an ABI, an antibody (e.g. an antibody that binds a component of the base editor system or a heterologous portion thereof) or fragment thereof (e.g. heavy chain domain 2 (CH₂) of IgM (MHD2) or IgE (EHD2), an immunoglobulin Fc region, a heavy chain domain 3 (CH3) of IgG or IgA, a heavy chain domain 4 (CH4) of IgM or IgE, an Fab, an Fab2, miniantibodies, and/or ZIP antibodies), a barnase-barstar dimer domain, a Bcl-xL domain, a Calcineurin A (CAN) domain, a Cardiac phospholamban transmembrane pentamer domain, a collagen domain, a Com RNA binding protein domain (e.g. SfMu Com coat protein domain, and SfMu Com binding protein domain), a Cyclophilin-Fas fusion protein (CyP-Fas) domain, a Fab domain, an Fe domain, a fibritin foldon domain, an FK506 binding protein (FKBP) domain, an FKBP binding domain (FRB) domain of mTOR, a foldon domain, a fragment X domain, a GAI domain, a GID1 domain, a Glycophorin A transmembrane domain, a GyrB domain, a Halo tag, an HIV Gp41 trimerisation domain, an HPV45 oncoprotein E7 C-terminal dimer domain, a hydrophobic polypeptide, a K Homology (KH) domain, a Ku protein domain (e.g., a Ku heterodimer), a leucine zipper, a LOV domain, a mitochondrial antiviral-signaling protein CARD filament domain, an MS2 coat protein domain (MCP), a non-natural RNA aptamer ligand that binds a corresponding RNA motif/aptamer, a parathyroid hormone dimerization domain, a PP7 coat protein (PCP) domain, a PSD95-Dlgl-zo-1 (PDZ) domain, a PYL domain, a SNAP tag, a SpyCatcher moiety, a SpyTag moiety, a streptavidin domain, a streptavidin-binding protein domain, a streptavidin binding protein (SBP) domain, a telomerase Sm7 protein domain (e.g. Sm7 homoheptamer or a monomeric Sm-like protein), and/or fragments thereof. In embodiments, an additional heterologous portion comprises a polynucleotide (e.g., an RNA motif), such as an MS2 phage operator stem-loop (e.g., an MS2, an MS2 C-5 mutant, or an MS2 F-5 mutant), a non-natural RNA motif, a PP7 operator stem-loop, an SfMu phate Com stem-loop, a steril alpha motif, a telomerase Ku binding motif, a telomerase Sm7 binding motif, and/or fragments thereof. Non-limiting examples of additional heterologous portions include polypeptides with at least about 85% sequence identity to any one or more of SEQ ID NOs: 380, 382, 384, 386-388, or fragments thereof. Non-limiting examples of additional heterologous portions include polynucleotides with at least about 85% sequence identity to any one or more of SEQ ID NOs: 379, 381, 383, 385, or fragments thereof.

[0478] In some instances, components of the base editing system are associated with one another through the interaction of leucine zipper domains (e.g., SEQ ID NOs: 387 and 388). In some cases, components of the base editing system are associated with one another through polypeptide domains (e.g., FokI domains) that associate to form protein complexes containing about, at least about, or no more than about 1, 2 (i.e., dimerize), 3, 4, 5, 6, 7, 8, 9, 10 polypeptide domain units, optionally the polypeptide domains may include alterations that reduce or eliminate an activity thereof.

[0479] In some instances, components of the base editing system are associated with one another through the interaction of multimeric antibodies or fragments thereof (e.g., IgG, IgD, IgA, IgM, IgE, a heavy chain domain 2 (CH₂) of IgM (MHD2) or IgE (EHD2), an immunoglobulin Fc region, a heavy chain domain 3 (CH3) of IgG or IgA, a heavy chain domain 4 (CH4) of IgM or IgE, an Fab, and an Fab2). In some instances, the antibodies are dimeric, trimeric, or tetrameric. In embodiments, the dimeric antibodies bind a polypeptide or polynucleotide component of the base editing system.

[0480] In some cases, components of the base editing system are associated with one another through the interaction of a polynucleotide-binding protein domain(s) with a polynucleotide(s). In some instances, components of the base editing system are associated with one another through the interaction of one or more polynucleotide-binding protein domains with polynucleotides that are self-complementary and/or complementary to one another so that complementary binding of the polynucleotides to one another brings into association their respective bound polynucleotide-binding protein domain(s).

[0481] In some instances, components of the base editing system are associated with one another through the interaction of a polypeptide domain(s) with a small molecule(s) (e.g., chemical inducers of dimerization (CIDs), also known as “dimerizers”). Non-limiting examples of CIDs include those disclosed in Amara, et al., “A versatile synthetic dimerizer for the regulation of protein-protein interactions,” PNAS, 94:10618-10623 (1997); and Voß, et al. “Chemically induced dimerization: reversible and spatiotemporal control of protein function in cells,” Current Opinion in Chemical Biology, 28:194-201 (2015), the disclosures of each of which are incorporated herein by reference in their entireties for all purposes. In some embodiments, the base editor inhibits base excision repair (BER) of the edited strand. In some embodiments, the base editor protects or binds the non-edited strand. In some embodiments, the base editor comprises UGI activity or USP activity. In some embodiments, the base editor comprises a catalytically inactive inosine-specific nuclease.

[0482] The base editors of the present disclosure can comprise any domain, feature or amino acid sequence which facilitates the editing of a target polynucleotide sequence. For example, in some embodiments, the base editor comprises a nuclear localization sequence (NLS). In some embodiments, an NLS of the base editor is localized between a deaminase domain and a polynucleotide programmable nucleotide binding domain. In some embodiments, an NLS of the base editor is localized C-terminal to a polynucleotide programmable nucleotide binding domain.

[0483] Protein domains included in the fusion protein can be a heterologous functional domain. Non-limiting examples of protein domains which can be included in the fusion protein include a deaminase domain (e.g., cytidine deaminase and/or adenosine deaminase), a uracil glycosylase inhibitor (UGI) domain, epitope tags, and reporter gene sequences.

[0484] In some embodiments, the adenosine base editor (ABE) can deaminate adenine in DNA. In some embodiments, ABE is generated by replacing APOBEC1 component of BE3 with natural or engineered E. coli TadA, human ADAR2, mouse ADA, or human ADAT2. In some embodiments, ABE comprises an evolved TadA variant. In some embodiments, the base editor is ABE8.1, which comprises or consists essentially of the following sequence or a fragment thereof having adenosine deaminase activity: SEQ ID NO: 331. Other ABE8 sequences are provided in the attached sequence listing (SEQ ID NOs: 332-354).

[0485] In some embodiments, the base editor includes an adenosine deaminase variant comprising an amino acid sequence, which contains alterations relative to an ABE 7*10 reference sequence, as described herein. The term “monomer” as used in Table 7 refers to a monomeric form of TadA*7.10 comprising the alterations described. The term “heterodimer” as used in Table 7 refers to the specified wild-type E. coli TadA adenosine deaminase fused to a TadA*7.10 comprising the alterations as described.

TABLE 7
Adenosine Deaminase Base Editor Variants

| | Adenosine | |
|---|---|---|
| ABE | Deaminase | Adenosine Deaminase Description |
| ABE-605m | MSP605 | monomer_TadA*7.10 + V82G + Y147T + Q154S |
| ABE-680m | MSP680 | monomer_TadA*7.10 + I76Y + V82G + Y147T + Q154S |
| ABE-823m | MSP823 | monomer_TadA*7.10 + L36H + V82G + Y147T + Q154S + N157K |
| ABE-824m | MSP824 | monomer_TadA*7.10 + V82G + Y147D + F149Y + Q154S + D167N |
| ABE-825m | MSP825 | monomer_TadA*7.10 + L36H + V82G + Y147D + F149Y + Q154S + N157K + D167N |
| ABE-827m | MSP827 | monomer_TadA*7.10 + L36H + I76Y + V82G + Y147T + Q154S + N157K |
| ABE-828m | MSP828 | monomer_TadA*7.10 + I76Y + V82G + Y147D + F149Y + Q154S + D167N |
| ABE-829m | MSP829 | monomer_TadA*7.10 + L36H + I76Y + V82G + Y147D + F149Y + Q154S + N157K + D167N |
| ABE-605d | MSP605 | heterodimer_(WT) + (TadA*7.10 + V82G + Y147T + Q154S) |
| ABE-680d | MSP680 | heterodimer_(WT) + (TadA*7.10 + I76Y + V82G + Y147T + Q154S) |
| ABE-823d | MSP823 | heterodimer_(WT) + (TadA*7.10 + L36H + V82G + Y147T + Q154S + N157K) |
| ABE-824d | MSP824 | heterodimer_(WT) + (TadA*7.10 + V82G + Y147D + F149Y + Q154S + D167N) |
| ABE-825d | MSP825 | heterodimer_(WT) + (TadA*7.10 + L36H + V82G + Y147D + F149Y + Q154S + N157K + D167N) |
| ABE-827d | MSP827 | heterodimer_(WT) + (TadA*7.10 + L36H + I76Y + V82G + Y147T + Q154S + N157K) |
| ABE-828d | MSP828 | heterodimer_(WT) + (TadA*7.10 + I76Y + V82G + Y147D + F149Y + Q154S + D167N) |
| ABE-829d | MSP829 | heterodimer_(WT) + (TadA*7.10 + L36H + I76Y + V82G + Y147D + F149Y + Q154S + N157K + D167N) |

[0486] In some embodiments, the base editor comprises a domain comprising all or a portion (e.g., a functional portion) of a uracil glycosylase inhibitor (UGI) or a uracil stabilizing protein (USP) domain.

### Linkers

[0487] In certain embodiments, linkers may be used to link any of the peptides or peptide domains of the disclosure. The linker may be as simple as a covalent bond, or it may be a polymeric linker many atoms in length. In certain embodiments, the linker is a polypeptide or based on amino acids. In other embodiments, the linker is not peptide-like. In certain embodiments, the linker is a covalent bond (e.g., a carbon-carbon bond, disulfide bond, carbon-heteroatom bond, etc.).

[0488] In some embodiments, any of the fusion proteins provided herein, comprise a cytidine or adenosine deaminase and a Cas9 domain that are fused to each other via a linker. Various linker lengths and flexibilities between the cytidine or adenosine deaminase and the Cas9 domain can be employed (e.g., ranging from very flexible linkers of the form (GGGS)ₙ (SEQ ID NO: 246), (GGGGS)ₙ (SEQ ID NO: 247), and (G)n to more rigid linkers of the form (EAAAK)ₙ (SEQ ID NO: 248), (SGGS)ₙ (SEQ ID NO: 355), SGSETPGTSESATPES (SEQ ID NO: 249) (see, e.g., Guilinger J P, et al. Fusion of catalytically inactive Cas9 to FokI nuclease improves the specificity of genome modification. Nat. Biotechnol. 2014; 32 (6): 577-82; the entire contents are incorporated herein by reference) and (XP)n) in order to achieve the optimal length for activity for the cytidine or adenosine deaminase nucleobase editor. In some embodiments, n is 1, 2, 3, 4, 5, 6, 7, 8, 9, 10, 11, 12, 13, 14, or 15. In some embodiments, the linker comprises a (GGS)n motif, wherein n is 1, 3, or 7. In some embodiments, cytidine deaminase or adenosine deaminase and the Cas9 domain of any of the fusion proteins provided herein are fused via a linker comprising the amino acid sequence SGSETPGTSESATPES (SEQ ID NO: 249), which can also be referred to as the XTEN linker.

[0489] In some embodiments, the domains of the base editor are fused via a linker that comprises the amino acid sequence of:

```
  (SEQ ID NO: 356)
SGGSSGSETPGTSESATPESSGGS,
  (SEQ ID NO: 357)
SGGSSGGSSGSETPGTSESATPESSGGSSGGS,
  (SEQ ID NO: 358)
GGSGGSPGSPAGSPTSTEEGTSESATPESGPGTSTEPSEGSAPGSPAGS
PTSTEEGTSTEPSEGSAPGTSTEPSEGSAPGTSESATPESGPGSEPATS
GGSGGS,
  (SEQ ID NO: 716)
EGGSEEEEESGS,
or
(SEQ ID NO: 717)
KGPKPKKEESEK.
```

[0490] In some embodiments, domains of the base editor are fused via a linker comprising the amino acid sequence SGSETPGTSESATPES (SEQ ID NO: 249), which may also be referred to as the XTEN linker. In some embodiments, a linker comprises the amino acid sequence SGGS (SEQ ID NO: 355). In some embodiments, the linker is 24 amino acids in length. In some embodiments, the linker comprises the amino acid sequence SGGSSGGSSGSETPGTSESATPES (SEQ ID NO: 359). In some embodiments, the linker is 40 amino acids in length. In some embodiments, the linker comprises the amino acid sequence: SGGSSGGSSGSETPGTSESATPESSGGSSGGSSGGSSGGS (SEQ ID NO: 360). In some embodiments, the linker is 64 amino acids in length. In some embodiments, the linker comprises the amino acid sequence: SGGSSGGSSGSETPGTSESATPESSGGSSGGSSGGSSGGSSGSETPGTSESATPESSGGSSGGS (SEQ ID NO: 361). In some embodiments, the linker is 92 amino acids in length. In some embodiments, the linker comprises the amino acid sequence:

(SEQ ID NO: 362)
PGSPAGSPTSTEEGTSESATPESGPGTSTEPSEGSAPGSPAGSPTSTEE
GTSTEPSEGSAPGTSTEPSEGSAPGTSESATPESGPGSEPATS.

[0491] In some embodiments, a linker comprises a plurality of proline residues and is 5-21, 5-14, 5-9, 5-7 amino acids in length, e.g., PAPAP (SEQ ID NO: 363), PAPAPA (SEQ ID NO: 364), PAPAPAP (SEQ ID NO: 365), PAPAPAPA (SEQ ID NO: 366), P(AP)4 (SEQ ID NO: 367), P(AP)7 (SEQ ID NO: 368), P(AP)10 (SEQ ID NO: 369) (see, e.g., Tan J, Zhang F, Karcher D, Bock R. Engineering of high-precision base editors for site-specific single nucleotide replacement. Nat Commun. 2019 Jan. 25; 10 (1): 439; the entire contents are incorporated herein by reference). Such proline-rich linkers are also termed “rigid” linkers.

Nucleic Acid Programmable DNA Binding Proteins with Guide RNAs

[0492] Provided herein are compositions and methods for base editing in cells. Further provided herein are compositions comprising a guide polynucleotide sequence, e.g., a guide RNA sequence, or a combination of 2, 3, 4, 5, 6, 7, 8, 9, 10, 11, 12, 13, 14, 15, 16, 17, 18, 19, 20, or more guide RNAs as provided herein. In some embodiments, a composition for base editing as provided herein further comprises a polynucleotide that encodes a base editor, e.g., a C-base editor or an A-base editor. For example, a composition for base editing may comprise a mRNA sequence encoding a BE, a BE4, an ABE, and a combination of one or more guide RNAs as provided. A composition for base editing may comprise a base editor polypeptide and a combination of one or more of any guide RNAs provided herein. Such a composition may be used to effect base editing in a cell through different delivery approaches, for example, electroporation, nucleofection, viral transduction or transfection. In some embodiments, the composition for base editing comprises an mRNA sequence that encodes a base editor and a combination of one or more guide RNA sequences provided herein for electroporation.

[0493] Some aspects of this disclosure provide systems comprising any of the fusion proteins or complexes provided herein, and a guide RNA bound to a nucleic acid programmable DNA binding protein (napDNAbp) domain (e.g., a Cas9 (e.g., a dCas9, a nuclease active Cas9, or a Cas9 nickase) or Cas12) of the fusion protein or complex. These complexes are also termed ribonucleoproteins (RNPs). In some embodiments, the guide nucleic acid (e.g., guide RNA) is from 15-100 nucleotides long and comprises a sequence of at least 10 contiguous nucleotides that is complementary to a target sequence. In some embodiments, the target sequence is a DNA sequence. In some embodiments, the target sequence is an RNA sequence. In some embodiments, the target sequence is a sequence in the genome of a bacteria, yeast, fungi, insect, plant, or animal. In some embodiments, the target sequence is a sequence in the genome of a human. In some embodiments, the 3′ end of the target sequence is immediately adjacent to a canonical PAM sequence (NGG). In some embodiments, the 3′ end of the target sequence is immediately adjacent to a non-canonical PAM sequence (e.g., a sequence listed in Table 3 or 5′-NAA-3′). In some embodiments, the guide nucleic acid (e.g., guide RNA) is complementary to a sequence in a gene of interest (e.g., a gene associated with a disease or disorder). Some aspects of this disclosure provide methods of using the fusion proteins, or complexes provided herein. For example, some aspects of this disclosure provide methods comprising contacting a DNA molecule with any of the fusion proteins or complexes provided herein, and with at least one guide RNA, wherein the guide RNA is about 15-100 nucleotides long and comprises a sequence of at least 10 contiguous nucleotides that is complementary to a target sequence.

[0494] The domains of the base editor disclosed herein can be arranged in any order.

[0495] A defined target region can be a deamination window. A deamination window can be the defined region in which a base editor acts upon and deaminates a target nucleotide. In some embodiments, the deamination window is within a 2, 3, 4, 5, 6, 7, 8, 9, or 10 base regions. In some embodiments, the deamination window is 5, 6, 7, 8, 9, 10, 11, 12, 13, 14, 15, 16, 17, 18, 19, 20, 21, 22, 23, 24, or 25 bases upstream of the PAM.

[0496] The base editors of the present disclosure can comprise any domain, feature or amino acid sequence which facilitates the editing of a target polynucleotide sequence.

### CAR-T Cell Therapies

[0497] Modification of immune cells to express a chimeric antigen receptor can enhance an immune cell's immunoreactive activity, wherein the chimeric antigen receptor has an affinity for an epitope on an antigen, wherein the antigen is associated with an altered fitness of an organism. For example, the chimeric antigen receptor can have an affinity for an epitope on a protein expressed in a diseased cell. Because the CAR-T cells can act independently of major histocompatibility complex (MHC), activated CAR-T cells can kill the diseased cell expressing the antigen. The direct action of the CAR-T cell evades defensive mechanisms that have evolved in response to MHC presentation of antigens to immune cells.

[0498] In embodiments, the immune cells contain a kill switch (e.g., RQR8 or an antibody-drug conjugate target). In some cases, a chimeric antigen receptor expressed by the cell contains the kill switch

[0499] The modified immune cells and methods provided herein address known limitations of CAR-T therapy and is a promising development towards the next generation of precision cell-based therapies.

[0500] In embodiments, one or more genes are modified in an allogeneic immune cell so that the modified allogeneic immune cell has a reduced level of, lacks, or have virtually undetectable levels of beta-2-microglobulin.

[0501] Immune cells and/or immune effector cells can be isolated or purified from a sample collected from a subject or a donor using standard techniques known in the art. For example, immune effector cells can be isolated or purified from a whole blood sample by lysing red blood cells and removing peripheral mononuclear blood cells by centrifugation. The immune effector cells can be further isolated or purified using a selective purification method that isolates the immune effector cells based on cell-specific markers such as CD25, CD3, CD4, CD8, CD28, CD45RA, or CD45RO. In one embodiment, CD4⁺ is used as a marker to select T cells. In one embodiment, CD8⁺ is used as a marker to select T cells. In one embodiment, CD4⁺ and CD8⁺ are used as a marker to select regulatory T cells.

[0502] In another embodiment, the present disclosure provides T cells that have targeted gene knock-outs at the TCR constant region (TRAC), which is responsible for TCRαβ surface expression. TCRαβ-deficient CAR-T cells are compatible with allogeneic immunotherapy (Qasim et al., Sci. Transl. Med. 9, eaaj2013 (2017); Valton et al., Mol Ther. 2015 September; 23 (9): 1507-1518). If desired, residual TCRαβ T cells are removed using CliniMACS magnetic bead depletion to minimize the risk of GVHD. In another embodiment, the present disclosure provides donor T cells selected ex vivo to recognize minor histocompatibility antigens expressed on recipient hematopoietic cells, thereby minimizing the risk of graft-versus-host disease (GVHD), which is the main cause of morbidity and mortality after transplantation (Warren et al., Blood 2010; 115 (19): 3869-3878).

[0503] A technique for isolating or purifying immune effector cells is flow cytometry. In fluorescence activated cell sorting a fluorescently labelled antibody with affinity for an immune effector cell marker is used to label immune effector cells in a sample. A gating strategy appropriate for the cells expressing the marker is used to segregate the cells.

[0504] In embodiments, the immune effector cells contemplated in the present disclosure are effector T cells. In some embodiments, the effector T cell is a naïve CD8⁺ T cell, a cytotoxic T cell, a natural killer T (NKT) cell, a natural killer (NK) cell, or a regulatory T (Treg) cell. In some embodiments, the effector T cells are thymocytes, immature T lymphocytes, mature T lymphocytes, resting T lymphocytes, or activated T lymphocytes. In some embodiments the immune effector cell is a CD4⁺ CD8⁺ T cell or a CD4⁻ CD8⁻ T cell. In some embodiments the immune effector cell is a T helper cell. In some embodiments the T helper cell is a T helper 1 (Th1), a T helper 2 (Th2) cell, or a helper T cell expressing CD4 (CD4+ T cell). In some embodiments, immune effector cells are effector NK cells. In some embodiments, the immune effector cell is any other subset of T cells. The modified immune effector cell may express, in addition to the chimeric antigen receptor (CAR), an exogenous cytokine, a different chimeric receptor, or any other agent that would enhance immune effector cell signaling or function. For example, co-expression of the chimeric antigen receptor and a cytokine may enhance the CAR-T cell's ability to lyse a target cell.

[0505] Provided herein are also polynucleotides that encode the chimeric antigen receptors (CARs) described herein. In some embodiments, the nucleic acid molecule is isolated or purified. Delivery of the nucleic acid molecules ex vivo or in vivo can be accomplished using methods known in the art or according to the methods of the disclosure. For example, a polynucleotide encoding a chimeric antigen receptor can be delivered to a cell in vivo using a lipid nanoparticle conjugated to a CD5-binding polypeptide of the disclosure, and containing a polynucleotide encoding the chimeric antigen receptor. Alternatively, immune cells obtained from a subject may be transformed with a nucleic acid vector encoding the chimeric antigen receptor. The vector may then be used to transform recipient immune cells so that these cells will then express the chimeric antigen receptor. Efficient means of transforming immune cells include transfection and transduction. Such methods are well known in the art. For example, applicable methods for delivery of the nucleic acid molecule encoding the chimeric antigen receptor (and the nucleic acid(s) encoding the base editor) can be found in International Application No. PCT/US2009/040040 and U.S. Pat. Nos. 8,450,112; 9,132,153; and 9,669,058, each of which is incorporated herein in its entirety. Additionally, those methods and vectors described herein for delivering the nucleic acid encoding the base editor are applicable to delivering the nucleic acid encoding the chimeric antigen receptor.

### Chimeric Antigen Receptors and CAR-T Cells

[0506] The present disclosure provides immune cells modified (e.g., in vivo) to express chimeric antigen receptors (CARs). Modification of immune cells to express a chimeric antigen receptor can enhance an immune cell's immunoreactive activity, wherein the chimeric antigen receptor has an affinity for an epitope on an antigen, wherein the antigen is associated with an altered fitness of an organism. For example, the chimeric antigen receptor can have an affinity for an epitope on a protein expressed in a neoplastic cell. Because the CAR-T cells can act independently of major histocompatibility complex (MHC), activated CAR-T cells can kill the neoplastic cell expressing the antigen. The direct action of the CAR-T cell evades neoplastic cell defensive mechanisms that have evolved in response to MHC presentation of antigens to immune cells. Exemplary chimeric antigen receptors, modified immune cells, and methods for preparing the same are described in PCT Applications No. PCT/US2020/013964, PCT/US2020/052822, PCT/US2020/018178, PCT/US2021/52035, and PCT/US2022/075021, or in Hardke-Wolenski, et al., Biomedicines 10:1493 (2022), the disclosures of which are incorporated herein by reference in their entirety for all purposes. In some embodiments, the modified immune cells of the disclosure express a CAR containing an antigen binding domain containing a CD5-binding polypeptide of the disclosure.

[0507] However, target antigens associated with neoplastic cells may also be expressed on healthy immune cells. Accordingly, activated CAR-T cells not only kill neoplastic cells expressing the target antigen but also healthy immune cells that also express the target antigen. To prevent this fratricide or self-killing of immune cells, the disclosure provides a CAR-T that has been modified using nucleobase editors to reduce or eliminate the expression of a target antigen (e.g., CD5) to provide fratricide resistance. In some embodiments, the disclosure provides a fratricide resistant modified immune effector cell that expresses a chimeric antigen receptor to target a neoplastic cell.

[0508] Some embodiments comprise autologous immune cell immunotherapy, wherein T cells within a subject in need of CAR-T cell therapy are modified in vivo to express a chimeric antigen receptor. In some embodiments, the T cells are modified by administering to the subject a lipid nanoparticle conjugated to an anti-CD5 polypeptide of the disclosure and containing a polynucleotide encoding a chimeric antigen receptor. The modified immune cells express the chimeric antigen receptor and are effectively redirected against specific antigens. The immune cells modified to express the chimeric antigen receptor are effective in treating a neoplasia (e.g., T- or NK-cell malignancy) in the subject.

[0509] Some embodiments comprise autologous immune cell immunotherapy, wherein immune cells are obtained from a subject having a disease or altered fitness characterized by cancerous or otherwise altered cells expressing a surface marker. The obtained immune cells are genetically modified to express a chimeric antigen receptor and are effectively redirected against specific antigens. Thus, in some embodiments, immune cells are obtained from a subject in need of CAR-T immunotherapy. In some embodiments, these autologous immune cells are cultured and modified shortly after they are obtained from the subject. In other embodiments, the autologous cells are obtained and then stored for future use. This practice may be advisable for individuals who may be undergoing parallel treatment that will diminish immune cell counts in the future. In allogeneic immune cell immunotherapy, immune cells can be obtained from a donor other than the subject who will be receiving treatment. In some embodiments, immune cells are obtained from a healthy subject or donor and are genetically modified to express a chimeric antigen receptor and are effectively redirected against specific antigens. The immune cells, after modification to express a chimeric antigen receptor, are administered to a subject for treating a neoplasia (e.g., T- or NK-cell malignancy). In some embodiments, immune cells to be modified to express a chimeric antigen receptor can be obtained from pre-existing stock cultures of immune cells.

[0510] Immune cells and/or immune effector cells can be isolated or purified from a sample collected from a subject or a donor using standard techniques known in the art. For example, immune effector cells can be isolated or purified from a whole blood sample by lysing red blood cells and removing peripheral mononuclear blood cells by centrifugation. The immune effector cells can be further isolated or purified using a selective purification method that isolates the immune effector cells based on cell-specific markers such as CD25, CD3, CD4, CD8, CD28, CD45RA, or CD45RO. In one embodiment, CD4⁺ is used as a marker to select T cells. In one embodiment, CD8⁺ is used as a marker to select T cells. In one embodiment, CD4⁺ and CD8⁺ are used as a marker to select regulatory T cells.

[0511] Provided herein are also nucleic acids that encode the chimeric antigen receptors described herein. In some embodiments, the nucleic acid is isolated or purified. Delivery of the nucleic acids ex vivo or in vitro can be accomplished using methods known in the art. For example, immune cells obtained from a subject may be transformed with a nucleic acid vector encoding the chimeric antigen receptor. The vector may then be used to transform recipient immune cells so that these cells will then express the chimeric antigen receptor. Efficient means of transforming immune cells include transfection and transduction. Such methods are well known in the art. For example, applicable methods for delivery the nucleic acid molecule encoding the chimeric antigen receptor can be found in International Application No. PCT/US2009/040040 and U.S. Pat. Nos. 8,450,112; 9,132,153; and 9,669,058, each of which is incorporated herein in its entirety. Additionally, those methods and vectors described herein for delivering a polynucleotide are applicable to delivering the polynucleotide encoding the chimeric antigen receptor.

### Extracellular Binding Domain

[0512] The chimeric antigen receptors of the disclosure include an extracellular binding domain. The extracellular binding domain of a chimeric antigen receptor contemplated herein comprises an amino acid sequence of an antibody (e.g., a CD5-binding polypeptide of the disclosure), or an antigen binding fragment thereof, that has an affinity for a specific antigen. In some embodiments, the antigen is a cluster of differentiation 5 (CD5) polypeptide, or a fragment thereof.

[0513] In some embodiments the chimeric antigen receptor comprises an amino acid sequence of an antibody. In some embodiments, the chimeric antigen receptor comprises the amino acid sequence of an antigen binding fragment of an antibody (e.g., a VHH antibody of the disclosure). The antibody (or fragment thereof) portion of the extracellular binding domain recognizes and binds to an epitope of an antigen (e.g., CD5). In some embodiments, the antibody fragment portion of a chimeric antigen receptor is a VHH antibody. In other embodiments, the antibody fragment portion of a chimeric antigen receptor is a multichain variable fragment, which comprises more than one extracellular binding domains and therefore bind to more than one antigen simultaneously. In a multiple chain variable fragment embodiment, a hinge region may separate the different variable fragments, providing necessary spatial arrangement and flexibility.

[0514] In some embodiments, the extracellular binding domain is a CD5 binding polypeptide of the disclosure.

[0515] In other embodiments, the antibody portion of a chimeric antigen receptor comprises at least one heavy chain and at least one light chain. In some embodiments, the antibody portion of a chimeric antigen receptor comprises two heavy chains, joined by disulfide bridges and two light chains, wherein the light chains are each joined to one of the heavy chains by disulfide bridges. In some embodiments, the light chain comprises a constant region and a variable region. Complementarity determining regions residing in the variable region of an antibody are responsible for the antibody's affinity for a particular antigen. Thus, antibodies that recognize different antigens comprise different complementarity determining regions. Complementarity determining regions reside in the variable domains of the extracellular binding domain, and variable domains (i.e., the variable heavy and variable light) can be linked with a linker or, in some embodiments, with disulfide bridges. In some embodiments, the variable heavy chain and variable light chain are linked by a (GGGGS)ₙ linker (SEQ ID NO: 247), wherein the n is an integer from 1 to 10. In some embodiments, the linker is a (GGGGS)₃ linker (SEQ ID NO: 624).

[0516] In some embodiments, the antigen recognized and bound by the extracellular domain is a protein or peptide, a nucleic acid, a lipid, or a polysaccharide. Antigens can be heterologous, such as those expressed in a pathogenic bacteria or virus. Antigens can also be synthetic; for example, some individuals have extreme allergies to synthetic latex and exposure to this antigen can result in an extreme immune reaction. In some embodiments, the antigen is autologous, and is expressed on a diseased or otherwise altered cell.

[0517] For example, in some embodiments, the antigen is expressed in a neoplastic cell. In some embodiments, the neoplastic cell is a malignant T- or NK-cell. In some embodiments, the malignant T- or NK-cell is a malignant precursor T- or NK-cell. In some embodiments, the malignant T- or NK-cell is a malignant mature T- or NK-cell. Nonlimiting examples of neoplasia include T-cell acute lymphoblastic leukemia (T-ALL), mycosis fungoides (MF), Sézary syndrome (SS), Peripheral T/NK-cell lymphoma, Anaplastic large cell lymphoma ALK+, Primary cutaneous T-cell lymphoma, T-cell large granular lymphocytic leukemia, Angioimmunoblastic T/NK-cell lymphoma, Hepatosplenic T-cell lymphoma, Primary cutaneous CD30+lymphoproliferative disorders, Extranodal NK/T-cell lymphoma, Adult T-cell leukemia/lymphoma, T-cell prolymphocytic leukemia, Subcutaneous panniculitis-like T-cell lymphoma, Primary cutaneous gamma-delta T-cell lymphoma, Aggressive NK-cell leukemia, and Enteropathy-associated T-cell lymphoma.

[0518] Antibody-antigen interactions are noncovalent interactions resulting from hydrogen bonding, electrostatic or hydrophobic interactions, or from van der Waals forces. The affinity of extracellular binding domain of the chimeric antigen receptor for an antigen can be calculated with the following formula:

$${K}_{A} = [ Antibody - Antigen ] / [ Antibody ] [ Antigen ] , wherein$$

$$[ Ab ] = molar concentration of unoccupied binding sites on the antibody ;$$

$$[ Ab ] = molar concentration of unoccupied binding sites on the antigen ;$$

$$and$$

$$[ Ab - Ag ] = molar concentration of the antibody - antigen complex .$$

[0519] The antibody-antigen interaction can also be characterized based on the dissociation of the antigen from the antibody. The dissociation constant (K_{D}) is the ratio of the association rate to the dissociation rate and is inversely proportional to the affinity constant. Thus, K_{D}=1/KA. Those skilled in the art will be familiar with these concepts and will know that traditional methods, such as ELISA assays, can be used to calculate these constants.

### Transmembrane Domain

[0520] The chimeric antigen receptors of the disclosure include a transmembrane domain. The transmembrane domain of the chimeric antigen receptors described herein spans the CAR-T cell's lipid bilayer cellular membrane and separates the extracellular binding domain and the intracellular signaling domain. In some embodiments, this domain is derived from other receptors having a transmembrane domain, while in other embodiments, this domain is synthetic. In some embodiments, the transmembrane domain may be derived from a non-human transmembrane domain and, in some embodiments, humanized. By “humanized” is meant having the sequence of the nucleic acid encoding the transmembrane domain optimized such that it is more reliably or efficiently expressed in a human subject. In some embodiments, the transmembrane domain is derived from another transmembrane protein expressed in a human immune effector cell. Examples of such proteins include, but are not limited to, subunits of the T cell receptor (TCR) complex, PD1, or any of the Cluster of Differentiation proteins, or other proteins, that are expressed in the immune effector cell and that have a transmembrane domain. In some embodiments, the transmembrane domain will be synthetic, and such sequences will comprise many hydrophobic residues.

[0521] Transmembrane domains for use in the disclosed CARs can include at least the transmembrane region(s) of) the alpha, beta or zeta chain of the T-cell receptor, CD28, CD3 epsilon, CD45, CD4, CD5, CD8, CD9, CD16, CD22, CD33, CD37, CD64, CD80, CD86, CD134, CD137, CD154. In some embodiments, the transmembrane domain is derived from CD4, CD8α, CD28 and CD3ζ.

[0522] The chimeric antigen receptor is designed, in some embodiments, to comprise a spacer between the transmembrane domain and the extracellular domain, the intracellular domain, or both. Such spacers can be 1, 2, 3, 4, 5, 6, 7, 8, 9, 10, 11, 12, 13, 14, 15, 16, 17, 18, 19, or 20 amino acids in length. In some embodiments, the spacer can be 20, 30, 40, 50, 60, 70, 80, 90, or 100 amino acids in length. In still other embodiments the spacer can be between 100 and 500 amino acids in length. The spacer can be any polypeptide that links one domain to another and are used to position such linked domains to enhance or optimize chimeric antigen receptor function.

### Intracellular Signaling Domain

[0523] The chimeric antigen receptors of the disclosure include an intracellular signaling domain. The intracellular signaling domain is the intracellular portion of a protein expressed in a T cell that transduces a T cell effector function signal (e.g., an activation signal) and directs the T cell to perform a specialized function. T cell activation can be induced by a number of factors, including binding of cognate antigen to the T cell receptor on the surface of T cells and binding of cognate ligand to costimulatory molecules on the surface of the T cell. A T cell co-stimulatory molecule is a cognate binding partner on a T cell that specifically binds with a co-stimulatory ligand, thereby mediating a co-stimulatory response by the T cell, such as, but not limited to, proliferation. Co-stimulatory molecules include but are not limited to an MHC class I molecule. Activation of a T cell leads to immune response, Such as T cell proliferation and differentiation (see, e.g., Smith-Garvin et al., Annu. Rev. Immunol., 27:591-619, 2009). Exemplary T cell signaling domains are known in the art. Non-limiting examples include the CD3ζ, CD8, CD28, CD27, CD154, GITR (TNFRSF18), CD134 (OX40), and CD137 (4-1BB) signaling domains.

[0524] The intracellular signaling domain of the chimeric antigen receptor contemplated herein comprises a primary signaling domain. In some embodiments, the chimeric antigen receptor comprises the primary signaling domain and a secondary, or co-stimulatory, signaling domain.

[0525] In some embodiments, the primary signaling domain comprises one or more immunoreceptor tyrosine-based activation motifs, or ITAMs. In some embodiments, the primary signaling domain comprises more than one ITAM. ITAMs incorporated into the chimeric antigen receptor may be derived from ITAMs from other cellular receptors. In some embodiments, the primary signaling domain comprising an ITAM may be derived from subunits of the TCR complex, such as CD3γ, CD3ε, CD3ζ, or CD3δ. In some embodiments, the primary signaling domain comprising an ITAM may be derived from FcRγ, FcRβ, CD5, CD22, CD79a, CD79b, or CD66d.

[0526] In some embodiments, the primary signaling domain is selected from the group consisting of CD8, CD28, CD134 (OX40), CD137 (4-1BB), and CD3ζ.

[0527] In some embodiments, the secondary, or co-stimulatory, signaling domain is derived from CD2, CD4, CD5, CD8α, CD28, CD83, CD134, CD137 (4-1BB), ICOS, or CD154, or a combination thereof. In some embodiments, the co-signaling domain is a cytoplasmic domain.

[0528] In some embodiments, the CAR comprises one or more signaling domains.

### Molecular Switches

[0529] In various embodiments, an immune cell (e.g., a CAR-T cell) of the disclosure expresses a molecular switch alternatively referred to as a “kill switch,” “suicide switch,” or “safety switch.” In some cases, a CAR of the disclosure contains a molecular switch. A kill switch is activated by a pharmaceutical agent (e.g., an antibody). When a kill switch is activated, the kill switch mediates killing of the cell expressing the kill switch. For example, in an embodiment, a kill switch expressed on the surface of a cell mediates the induction of complement-mediated killing of the cell in the presence of a monoclonal antibody (e.g., Rituximab). In some cases, a kill switch binds Rituximab.

### Immunoconjugates

[0530] In some embodiments, an anti-CD5 VHH antibody of the disclosure is or is part of an immunoconjugate (“anti-CD5 VHH antibody immunoconjugate”), in which the anti-CD5 VHH antibody is conjugated to one or more heterologous molecule(s), such as, but not limited to, a cytotoxic or an imaging agent. The fusion of the cytotoxic agent with the anti-CD5 VHH antibody may have therapeutic value. Cytotoxic agents include, but are not limited to, radioactive isotopes (e.g., At²¹¹, I¹³¹, I¹²⁵, Y⁹⁰, Rel⁸⁶, Rel⁸⁸, Sml⁵³, Bi²¹², P³², Pb²¹² and radioactive isotopes of Lu); chemotherapeutic agents (e.g., maytansinoids, taxanes, methotrexate, adriamicin, vinca alkaloids (vincristine, vinblastine, etoposide), doxorubicin, melphalan, mitomycin C, chlorambucil, daunorubicin or other intercalating agents); growth inhibitory agents; enzymes and fragments thereof such as nucleolytic enzymes; antibiotics; toxins such as small molecule toxins or enzymatically active toxins. In some embodiments, the antibody is conjugated to one or more cytotoxic agents, such as chemotherapeutic agents or drugs, growth inhibitory agents, toxins (e.g., protein toxins, enzymatically active toxins of bacterial, fungal, plant, or animal origin, or fragments thereof), or radioactive isotopes.

[0531] Among the anti-CD5 VHH antibody immunoconjugates are antibody-drug conjugates (ADCs), in which an anti-CD5 VHH antibody is conjugated to one or more drugs, including but not limited to a maytansinoid (see U.S. Pat. Nos. 5,208,020, 5,416,064 and European Patent EP 0 425 235 B 1); an auristatin such as monomethylauristatin drug moieties DE and DF (MMAE and MMAF) (see U.S. Pat. Nos. 5,635,483 and 5,780,588, and 7,498,298); a dolastatin; a calicheamicin or derivative thereof (see U.S. Pat. Nos. 5,712,374, 5,714,586, 5,739,116, 5,767,285, 5,770,701, 5,770,710, 5,773,001, and 5,877,296; Hinman et al., Cancer Res. 53: 3336-3342 (1993); and Lode et al, Cancer Res. 58: 2925-2928 (1998)); an anthracycline such as daunomycin or doxorubicin (see Kratz et al., Current Med. Chem. 13: 477-523 (2006); Jeffrey et al., Bioorganic & Med. Chem. Letters 16: 358-362 (2006); Torgov et al., Bioconj. Chem. 16: 717-721 (2005); Nagy et al, Proc. Natl. Acad. Sci. USA 97: 829-834 (2000); Dubowchik et al, Bioorg. & Med. Chem. Letters 12: 1529-1532 (2002); King et al, J. Med. Chem. 45: 4336-4343 (2002); and U.S. Pat. No. 6,630,579); methotrexate; vindesine; a taxane such as docetaxel, paclitaxel, larotaxel, tesetaxel, and ortataxel; a trichothecene; and CC1065.

[0532] Also among the anti-CD5 VHH antibody immunoconjugates are those in which the antibody is conjugated to an enzymatically active toxin or fragment thereof, including but not limited to diphtheria A chain, nonbinding active fragments of diphtheria toxin, exotoxin A chain (from Pseudomonas aeruginosa), ricin A chain, abrin A chain, modeccin A chain, alpha-sarcin, Aleurites fordii proteins, dianthin proteins, Phytolaca americana proteins (PAPI, PAPII, and PAP-S), Momordica charantia inhibitor, curcin, crotin, Sapaonaria officinalis inhibitor, gelonin, mitogellin, restrictocin, phenomycin, enomycin, and the tricothecenes.

[0533] In some embodiments, the anti-CD5 VHH antibody is conjugated to a protein degrader, such as those described in Frere, G., et al. Methods in Cell Biology, 167:1-26 (2022) and Sasso, J., et al. Biochemistry, 62:601-623 (2023), or in International Patent Applications No. WO 2021/053555, WO 2021/249517, WO 2020/006264, WO 2008/115516, WO 2021/126805, WO 2021/178920, WO 2021/127080, WO 2014/094138, WO 2015/200795, WO 2017/117118, and WO 2020/079103 the disclosures of which is incorporated herein by reference in their entireties for all purposes. In some embodiments, the degrader is CC-122, CC-220, CC-99282, CFT7455, DKY709, CR8, Glue01, HQ005, FPFT-2216, TMX-4116, Eragidomide, BTX-1188, MG-277, ZHX-1-161, Indisulam, E7820, dCeMM1, CQS, NRX-252114, NRX-252262, BI-3802, CCT369260, Cyclosporin A, Lupkynis, Sanglifehrin A, Auxin, Jasmonate, lenalidomide (Revlimid), lenalidomide, pomalidomide (Pomalyst), or thalidomide. Non-limiting examples of types of protein degraders suitable for use in compositions, conjugates, and/or methods of the disclosure include heterobifunctional degraders and molecular glue degraders.

[0534] Also among the anti-CD5 VHH antibody immunoconjugates are those in which the anti-CD5 VHH antibody is conjugated to a radioactive atom to form a radioconjugate. Exemplary radioactive isotopes include At²¹¹, I¹³¹, I¹²⁵, Y⁹⁰, Re¹⁸⁶, Re¹⁸⁸, Sm¹⁵³, Bi²¹², P³², Pb²¹² and radioactive isotopes of Lu.

[0535] Conjugates of an anti-CD5 VHH antibody and cytotoxic agent may be made using any of a number of known protein coupling agents, e.g., linkers, (see Vitetta et al., Science 238:1098 (1987)). The linker may be a “cleavable linker” facilitating release of a cytotoxic drug in the cell, such as acid-labile linkers, peptidase-sensitive linkers, photolabile linkers, dimethyl linkers, and disulfide-containing linkers (Chari et al., Cancer Res. 52: 127-131 (1992); U.S. Pat. No. 5,208,020).

### Modified Polynucleotides

[0536] To enhance expression, stability, and/or genomic/base editing efficiency, and/or reduce possible toxicity, a polynucleotide of the disclosure can be modified to include one or more modified nucleotides and/or chemical modifications, e.g. using pseudo-uridine, 5-Methyl-cytosine, 2′-O-methyl-3′-phosphonoacetate, 2′-O-methyl thioPACE (MSP), 2′-O-methyl-PACE (MP), 2′-fluoro RNA (2′-F-RNA), =constrained ethyl (S-cEt), 2′-O-methyl (‘M’), 2′-O-methyl-3′-phosphorothioate (‘MS’), 2′-O-methyl-3′-thiophosphonoacetate (‘MSP’), 5-methoxyuridine, phosphorothioate, and N1-Methylpseudouridine.

### Expression of Polypeptides in a Host Cell

[0537] Polypeptides of the present disclosure may be expressed in virtually any host cell of interest, including mammalian cells (e.g., human cells). In some embodiments, the host cell is an immune cell (e.g., T- or NK-cell). In some embodiments, the host cell is an immune cell (e.g., T- or NK-cell). In some embodiments, the host cell is a T cell.

[0538] An expression vector containing a DNA encoding a polypeptide can be produced, for example, by linking the DNA to the downstream of a promoter in a suitable expression vector.

[0539] In some embodiments, the nucleic acid sequence is inserted into the genome of the cell (e.g., T cell or NK cell) by introducing a vector, for example, a viral or non-viral vector, comprising the nucleic acid. Examples of viral vectors include, but are not limited to, adeno-associated viral (AAV) vectors, retroviral vectors or lentiviral vectors. In some embodiments, the lentiviral vector is an integrase-deficient lentiviral vector. In some embodiments, the nucleic acid sequence is inserted into the genome of the cell (e.g., T cell) via non-viral delivery. In non-viral delivery methods, the nucleic acid can be naked DNA, or in a non-viral plasmid or vector.

[0540] Regarding the promoter to be used, any promoter appropriate for a host to be used for gene expression can be used. For example, when the host is an animal cell, an SRα promoter, SV40 promoter, LTR promoter, cytomegalovirus (CMV) promoter, Rous sarcoma virus (RSV) promoter, Moloney mouse leukemia virus (MoMuLV), LTR, herpes simplex virus thymidine kinase (HSV-TK), MND (a synthetic promoter that contains the U3 region of a modified MoMuLV LTR with myeloproliferative sarcoma virus enhancer) promoter, and the like can be used. In some embodiments, the promoter is a CMV promoter or an SR.alpha. promoter, or the like.

### Polynucleotides and Vectors

[0541] In some cases, more than one anti-CD5-binding VHH antibody (i.e., anti-CD5 VHH) is coupled or linked (e.g., covalently linked) to other sequences, e.g., a leader amino acid sequence, domains of a chimeric antigen receptor, one or more spacer or linker (flexible spacer or linker) amino acid sequences, or one or more epitope tag amino acid sequences. In an embodiment, a polynucleotide molecule, such as a recombinant or isolated polynucleotide molecule, encodes a polypeptide containing an anti-CD5 VHH polypeptide (e.g., a VHH antibody or a chimeric antigen receptor). In an embodiment, the polynucleotide encodes a fragment or portion of the anti-CD5 VHH, where the fragment or portion maintains CD5 binding activity.

[0542] In an embodiment, an anti-CD5 VHH can be humanized, i.e., modified to increase its similarity to antibodies or antibody variants produced naturally in humans, using techniques known and practiced in the art. Briefly and by way of nonlimiting example, a humanized antibody can be generated by inserting the appropriate CDR coding sequences (e.g., ‘donor’ sequences that are responsible for the desired binding properties) into a human antibody “scaffold” (e.g., ‘acceptor’ sequences) comprising essentially invariant framework region (FR) sequences (FRs). In embodiments, the CDRs of the anti-CD5 VHH antibodies described herein may be inserted into FRs, which provide the structural scaffold that allows the CDRs to bind to CD5. Recombinant DNA methods using an appropriate vector and expression in mammalian cells are employed and routinely practiced in the art to achieve the production of recombinant humanized antibodies.

[0543] In an embodiment, the polynucleotide encodes a CD5-binding VHH molecule having binding function, or a functional binding portion thereof. In embodiments, antibody fragments, microproteins, darpins, anticalins, peptide mimetic molecules, aptamers, synthetic molecules, etc. can be linked to the anti-CD5 VHH binding molecule.

[0544] In an embodiment, an anti-CD5 VHH can be modified, for example, by attachment (e.g., either directly or indirectly via a linker or spacer) to another agent (e.g., a detectable label, a cytotoxic drug, and/or another polypeptide). Accordingly, a polynucleotide (e.g., DNA) that encodes one anti CD5 VHH is joined (in reading frame) with a polynucleotide encoding a second polypeptide, and so on. In certain embodiments, additional amino acids are encoded within the polynucleotide between the anti-CD5 VHH and other polypeptides so as to produce an unstructured region (e.g., a flexible spacer) that separates the anti-CD5 VHH from the other polypeptides to better promote independent folding of each polypeptide into its active or functional conformation or shape. Commercially available techniques for fusing proteins (or their encoding polynucleotides) may be employed to recombinantly join or couple polypeptide sequences to one another.

[0545] The compositions and methods described herein in various embodiments include an isolated polynucleotide sequence or an isolated polynucleotide molecule that encodes a polypeptide (e.g., anti-CD5 VHH or a chimeric antigen receptor containing an anti-CD5 VHH domain of the disclosure). Accordingly, in some embodiments, the isolated polynucleotide sequence or isolated polynucleotide molecule comprises or consists of a polynucleotide sequence that encodes a polypeptide molecule (anti-CD5 VHH) having an amino acid sequence listed in any one of Tables 1A-1C, or a functional portion thereof, as described herein. In an embodiment, a composition comprises a combination of the isolated polynucleotide sequences or isolated polynucleotide molecules.

[0546] Also encompassed by the present disclosure are polynucleotide sequences, DNA or RNA, which are substantially complementary to the DNA sequences encoding the polypeptides described herein, and which specifically hybridize with these DNA sequences under conditions of stringency known to those of skill in the art. As referred to herein, substantially complementary means that the nucleotide sequence of the polynucleotide need not reflect the exact sequence of the original encoding sequences, but must be sufficiently similar in sequence to permit hybridization with a nucleic acid sequence under high stringency conditions. For example, non-complementary bases can be interspersed in a nucleotide sequence, or the sequences can be longer or shorter than the polynucleotide sequence, provided that the sequence has a sufficient number of bases complementary to the sequence to allow hybridization thereto. Conditions for stringency are described, e.g., in Ausubel, F. M., et al., Current Protocols in Molecular Biology, (Current Protocol, 1994), and Brown, et al., Nature, 366:575 (1993); and further defined in conjunction with certain assays.

[0547] Vectors and plasmids containing one or more of the polynucleotide molecules encoding the anti-CD5 VHH amino acid sequences of any one of Tables 1A-1C, or a functional portion thereof, are provided. Suitable vectors for use in eukaryotic and prokaryotic cells are known in the art and are commercially available or readily prepared by the skilled practitioner in the art. Additional vectors can also be found, for example, in Ausubel, F. M., et al., Ibid, and in Sambrook et al., “Molecular Cloning: A Laboratory Manual,” 2nd ED. (1989), and other editions.

[0548] Uses of plasmids, vectors or viruses (viral vectors) containing polynucleotides encoding the anti-CD5 VHHs as described herein include generation of mRNA or protein in vitro or in vivo. In related embodiments, host cells transformed with the plasmids, vectors, or virus vectors are provided, as described above. Nucleic acid molecules can be inserted into a construct (such as a prokaryotic expression plasmid, a eukaryotic expression vector, or a viral vector construct, which can, optionally, replicate and/or integrate into a recombinant host cell by known methods. The host cell can be a eukaryote or prokaryote and can include, for example and without limitation, yeast (such as Pichia pastoris or Saccharomyces cerevisiae), bacteria (such as E. coli, or Bacillus subtilis), animal cells or tissue (CHO or COS cells), insect Sf9 cells (such as baculoviruses infected SF9 cells), or mammalian cells (somatic or embryonic cells, Human Embryonic Kidney (HEK) cells, Chinese hamster ovary (CHO) cells, HeLa cells, human 293 cells (Expi293F), and monkey COS-7 cells). Suitable host cells also include a mammalian cell, a bacterial cell, a yeast cell, an insect cell, a plant cell, or an algal cell.

[0549] In another aspect, an RNA polynucleotide, in particular, mRNA, encodes a polypeptide as described herein. mRNA encoding the polypeptides may contain a 5′ cap structure, a 5′ UTR, an open reading frame, a 3′ UTR and poly-A sequence followed by a C30 stretch and a histone stem loop sequence (Thess, A. et al., 2015, Mol Ther, 23 (9): 1456-1464; Thran, M. et al., 2017, EMBO Molecular Medicine, DOI: 10.15252/emmm.201707678). Sequences may be codon-optimized for human use using techniques and protocols known and used by those skilled in the art. In an embodiment, the mRNA sequences do not include chemically modified bases. mRNAs encoding the anti-CD5 VHHs thereof as described herein may be capped enzymatically or further polyadenylated for in vivo studies/use. In an embodiment, a polypeptide of the disclosure is encoded by a mRNA molecule. In an embodiment, the mRNA may be delivered to or introduced into a cell.

[0550] Expression of proteins, which normally have a shortened serum half-life, by encoding mRNA, particularly sequence optimized, unmodified mRNA, advantageously prolongs the bioavailability of these proteins for in vivo activity. (see, e.g., K. Kariko et al, 2012, Mol. Ther., 20:948-953; Thess, A. et al., 2015, Mol Ther, 23 (9): 1456-1464).

### Recombinant Polypeptide Expression

[0551] In general, polypeptides of the disclosure (e.g., VHH antibodies) may be produced by transformation of a suitable host cell with all or part of a polypeptide-encoding nucleic acid molecule or fragment thereof in a suitable expression vehicle.

[0552] Those skilled in the field of molecular biology will understand that any of a wide variety of systems may be used to express a recombinant protein. The precise host cell used is not critical to the various aspects of the disclosure. A polypeptide of the disclosure may be produced in a prokaryotic host (e.g., E. coli) or in a eukaryotic host (e.g., an immune cell, such an immune effector cell (e.g., a T cell) Saccharomyces cerevisiae, insect cells, e.g., Sf21 cells, or mammalian cells, e.g., NIH 3T3, HeLa, or COS cells). Such cells are available from a wide range of sources (e.g., the American Type Culture Collection, Rockland, Md.; also, see, e.g., Ausubel et al., supra). The method of transformation or transfection and the choice of expression vehicle will depend on the host system selected. Transformation and transfection methods are described, e.g., in Ausubel et al. (supra); expression vehicles may be chosen from those provided, e.g., in Cloning Vectors: A Laboratory Manual (P. H. Pouwels et al., 1985, Supp. 1987).

[0553] A variety of expression systems exist for the production of the polypeptides (e.g., VHH antibodies or chimeric antigen receptors) of the disclosure. Expression vectors useful for producing such polypeptides include, without limitation, chromosomal, episomal, and virus-derived vectors, e.g., vectors derived from bacterial plasmids, from bacteriophage, from transposons, from yeast episomes, from insertion elements, from yeast chromosomal elements, from viruses such as baculoviruses, papova viruses, such as SV40, vaccinia viruses, adenoviruses, fowl pox viruses, pseudorabies viruses and retroviruses, and vectors derived from combinations thereof.

[0554] Once the recombinant polypeptide of the disclosure is expressed, it can be isolated, e.g., using affinity chromatography. In one example, an antibody (e.g., produced as described herein) raised against an antigen of the disclosure may be attached to a column and used to isolate the recombinant polypeptide. Lysis and fractionation of polypeptide-harboring cells prior to affinity chromatography may be performed by standard methods.

[0555] Once isolated, a recombinant protein can, if desired, be further purified, e.g., by high performance liquid chromatography (see, e.g., Fisher, Laboratory Techniques In Biochemistry and Molecular Biology, eds., Work and Burdon, Elsevier, 1980). Polypeptides of the disclosure, particularly short peptide fragments, can also be produced by chemical synthesis (e.g., by the methods described in Solid Phase Peptide Synthesis, 2nd ed., 1984 The Pierce Chemical Co., Rockford, Ill.). These general techniques of polypeptide expression and purification can also be used to produce and isolate useful peptide fragments or analogs (described herein).

### Delivery Systems

### Nucleic Acid-Based Delivery and Conjugated Lipid Nanoparticles

[0556] Nucleic acid molecules encoding a polypeptide according to the present disclosure can be administered to subjects or delivered into cells in vitro or in vivo by art-known methods or as described herein. For example, a polypeptide of the disclosure can be delivered by vectors (e.g., viral or non-viral vectors), or by naked DNA, DNA complexes, lipid nanoparticles, or a combination of the aforementioned compositions. A polypeptide may be delivered to a cell using any methods available in the art including, but not limited to, physical methods (e.g., electroporation, particle gun, calcium phosphate transfection), viral methods, non-viral methods (e.g., liposomes, cationic methods, lipid nanoparticles, polymeric nanoparticles), or biological non-viral methods (e.g., attenuated bacterial, engineered bacteriophages, mammalian virus-like particles, biological liposomes, erythrocyte ghosts, exosomes). In embodiments, the lipid nanoparticle is conjugated to a CD5-binding polypeptide of the disclosure. Such lipid nanoparticles can be useful in delivering a polynucleotide contained within the lipid nanoparticle (e.g., a polynucleotide encoding a chimeric antigen receptor) to a T cell of a subject in vivo. Methods for conjugating a polypeptide, such as a VHH antibody, to a lipid nanoparticle are known in the art (see, e.g., Yaozhong, et al. “Nanobody™-based delivery systems for diagnosis and targeted tumor therapy,” Front Immunol 8:1442 (2017)).

[0557] Nanoparticles, which can be organic or inorganic, are useful for delivering a polynucleotide or polypeptide to a cell. Nanoparticles are well known in the art and any suitable nanoparticle can be used to deliver a polypeptide or a polynucleotide encoding the same to a cell. In one example, organic (e.g., lipid and/or polymer) nanoparticles are suitable for use as delivery vehicles in certain embodiments of this disclosure. Non-limiting examples of lipid nanoparticles suitable for use in the methods of the present disclosure include those described in International Patent Application Publications No. WO2022140239, WO2022140252, WO2022140238, WO2022159421, WO2022159472, WO2022159475, WO2022159463, WO2021113365, WO2024019936, and WO2021141969, the disclosures of each of which is incorporated herein by reference in its entirety for all purposes.

### Viral Vectors

[0558] A polypeptide or polynucleotide can be delivered with a viral vector. In some embodiments, a polypeptide disclosed herein can be encoded on a polypeptide that is contained in a viral vector. In some embodiments, a polypeptide can be encoded on one or more viral vectors. Non-limiting examples of viral vectors include lentivirus (e.g., HIV and FIV-based vectors), Adenovirus (e.g., AD100), Retrovirus (e.g., Maloney murine leukemia virus, MML-V), herpesvirus vectors (e.g., HSV-2), rabies virus (see, e.g., U.S. Patent Application No. US 2022/0290164 A1, the disclosure of which is incorporated by reference in its entirety for all purposes), and Adeno-associated viruses (AAVs), or other plasmid or viral vector types.

### Non-Viral Platforms for Gene Transfer

[0559] Non-viral platforms for introducing a heterologous polynucleotide into a cell of interest are known in the art.

[0560] For example, the disclosure provides a method of inserting a heterologous polynucleotide into the genome of a cell using a Cas9 or Cas12 (e.g., Cas12b) ribonucleoprotein complex (RNP)-DNA template complex where an RNP including a Cas9 or Cas12 nuclease domain and a guide RNA, wherein the guide RNA specifically hybridizes to a target region of the genome of the cell, and wherein the Cas9 nuclease domain cleaves the target region to create an insertion site in the genome of the cell. A DNA template is then used to introduce a heterologous polynucleotide. In embodiments, the DNA template is a double-stranded or single-stranded DNA template, wherein the size of the DNA template is about 200 nucleotides or is greater than about 200 nucleotides, wherein the 5′ and 3′ ends of the DNA template comprise nucleotide sequences that are homologous to genomic sequences flanking the insertion site. In some embodiments, the DNA template is a single-stranded circular DNA template. In embodiments, the molar ratio of RNP to DNA template in the complex is from about 3:1 to about 100:1.

[0561] In some embodiments, the DNA template is a linear DNA template. In some examples, the DNA template is a single-stranded DNA template. In certain embodiments, the single-stranded DNA template is a pure single-stranded DNA template. In some embodiments, the single stranded DNA template is a single-stranded oligodeoxynucleotide (ssODN).

[0562] In other embodiments, a single-stranded DNA (ssDNA) can produce efficient HDR with minimal off-target integration. In one embodiment, an ssDNA phage is used to efficiently and inexpensively produce long circular ssDNA (cssDNA) donors. These cssDNA donors serve as efficient HDR templates when used with Cas9 or Cas12 (e.g., Cas12a, Cas12b), with integration frequencies superior to linear ssDNA (IssDNA) donors.

### Pharmaceutical Compositions

[0563] In some aspects, the present disclosure provides a pharmaceutical composition comprising any of the polypeptides, polynucleotides, or lipid nanoparticles described herein.

[0564] The pharmaceutical compositions of the present disclosure can be prepared in accordance with known techniques. See, e.g., Remington, The Science And Practice of Pharmacy (21st ed. 2005). In general, the cell, or population thereof is admixed with a suitable carrier prior to administration or storage, and in some embodiments, the pharmaceutical composition further comprises a pharmaceutically acceptable carrier. Suitable pharmaceutically acceptable carriers generally comprise inert substances that aid in administering the pharmaceutical composition to a subject, aid in processing the pharmaceutical compositions into deliverable preparations, or aid in storing the pharmaceutical composition prior to administration. Pharmaceutically acceptable carriers can include agents that can stabilize, optimize or otherwise alter the form, consistency, viscosity, pH, pharmacokinetics, solubility of the formulation. Such agents include buffering agents, wetting agents, emulsifying agents, diluents, encapsulating agents, and skin penetration enhancers. For example, carriers can include, but are not limited to, saline, buffered saline, dextrose, arginine, sucrose, water, glycerol, ethanol, sorbitol, dextran, sodium carboxymethyl cellulose, and combinations thereof.

[0565] In some embodiments, the pharmaceutical composition is formulated for delivery to a subject. Suitable routes of administrating the pharmaceutical composition described herein include, without limitation: topical, subcutaneous, transdermal, intradermal, intralesional, intraarticular, intraperitoneal, intravesical, transmucosal, gingival, intradental, intracochlear, transtympanic, intraorgan, epidural, intrathecal, intramuscular, intravenous, intravascular, intraosseus, periocular, intratumoral, intracerebral, and intracerebroventricular administration.

[0566] In some embodiments, the pharmaceutical composition described herein is administered locally to a diseased site. In some embodiments, the pharmaceutical composition described herein is administered to a subject by injection, by means of a catheter, by means of a suppository, or by means of an implant, the implant being of a porous, non-porous, or gelatinous material, including a membrane, such as a sialastic membrane, or a fiber.

[0567] In some embodiments, any of the polypeptides or lipid nanoparticles described herein are provided as part of a pharmaceutical composition. In some embodiments, the pharmaceutical composition comprises any of the CD5-binding polypeptides described herein. In some embodiments pharmaceutical composition comprises a lipid nanoparticle conjugated to a CD5-binding polypeptide of the disclosure and containing a polynucleotide encoding a chimeric antigen receptor, and a pharmaceutically acceptable excipient. Pharmaceutical compositions can optionally comprise one or more additional therapeutically active substances.

[0568] The compositions, as described above, can be administered in effective amounts. The effective amount will depend upon the mode of administration, the particular condition being treated, and the desired outcome. It may also depend upon the stage of the condition, the age and physical condition of the subject, the nature of concurrent therapy, if any, and like factors well-known to the medical practitioner. For therapeutic applications, it is that amount sufficient to achieve a medically desirable result.

[0569] In some embodiments, compositions in accordance with the present disclosure can be used for treatment of any of a variety of diseases, disorders, and/or conditions.

### Methods of Treatment

[0570] Some aspects of the present disclosure provide methods of treating a subject in need, the method comprising administering to a subject in need an effective therapeutic amount of a pharmaceutical composition as described herein. More specifically, the methods of treatment include administering to a subject in need thereof one or more pharmaceutical compositions comprising a CD5-binding polypeptide of the disclosure, such as a composition comprising a lipid nanoparticle conjugated to the CD5-binding polypeptide.

[0571] One of ordinary skill in the art would recognize that multiple administrations of the pharmaceutical compositions contemplated in particular embodiments may be required to affect the desired therapy. For example, a composition may be administered to the subject 1, 2, 3, 4, 5, 6, 7, 8, 9, or 10 or more times over a span of 1 week, 2 weeks, 3 weeks, 1 month, 2 months, 3 months, 4 months, 5 months, 6 months, 1 year, 2 years, 5, years, 10 years, or more.

[0572] Administration of the pharmaceutical compositions contemplated herein may be carried out using conventional techniques including, but not limited to, infusion, transfusion, or parenterally. In some embodiments, parenteral administration includes infusing or injecting intravascularly, intravenously, intramuscularly, intraarterially, intrathecally, intratumorally, intradermally, intraperitoneally, transtracheally, subcutaneously, subcuticularly, intraarticularly, subcapsularly, subarachnoidly and intrasternally.

### Substantially Identical Amino Acid and Nucleotide Sequences for VHHS

[0573] There is a large body of information in the literature supporting the fact that closely related antibody (Ab) sequences are capable of performing the same binding and therapeutic functions such that this is now generally accepted by those with ordinary skill in the art of immunological sciences. The creation of Abs with small numbers of amino acid sequence variations occurs naturally within mammals and some other animal species during the process of ‘affinity maturation’ in which Ab-producing cells that bind a newly encountered antigen (Ag) are expanded, and their progeny cells contain random mutations within portions of the Ab coding DNA that results in new, related Ab sequences. The cells expressing Abs that have gained improved binding properties for the new Ag are then selected and expanded, thereby increasing the amount of the improved antibody in the animal. This process continues through multiple generations of mutation and selection until Abs with greatly improved antigen binding properties result. The process of Ab affinity maturation demonstrates that related, yet not identical, Ab amino acid sequences can possess similar target binding properties and perform similar therapeutic functions in vivo.

[0574] The present disclosure provides anti-CD5 VHH antibodies having related sequences that are capable of binding CD5. The Abs described herein are heavy-chain only, single domain VHH antibodies, which are generated in camelid alpacas, which have been reported to be convenient sources of camelid VHH antibodies (See, e.g., Maass, D. R. et al., 2007, J. Immunol. Methods, 324:13-25). Briefly, an animal capable of producing VHH antibodies in response to an antigen are immunized with a selected CD5 antigen (CD5 Ag) one or multiple times to permit the animal to undergo affinity maturation of the anti-CD5 VHHs that are produced. Anti-CD5 VHHs are then isolated and the encoding DNA selected for expression of soluble VHHs that bind CD5 Ag and have potential therapeutic or diagnostic properties. During this process, many examples of closely related anti-CD5 binding VHHs are isolated, which are distinctive, and which are presumably intermediates that result from the affinity maturation process which occurs during anti-CD5 VHH production in alpaca lymphocytes. These related anti-CD5 VHHs are screened for binding to CD5 Ag, and the most promising members of homology groups of CD5-binding VHHs are identified and become lead candidates for further development.

[0575] Similar to all mammalian antibodies, VHHs consist of four, well-conserved ‘framework’ regions (FRs) which are important in forming the antibody structure. Between the FRs (FR1, FR2, FR3 and FR4) are three much less well-conserved CDRs or hypervariable regions (CDR1, CDR2 and CDR3) which principally interact with and bind to antigenic determinants or epitopes on antigens (Ags), such as CD5. The CDR sequences vary widely so as to interact and bind to epitopes of Ags. The third CDR, CDR3, is generally the longest in sequence and is most diverse of the CDRs within VHHs, both in size and sequence. By way of nonlimiting example, CDR3 in VHHs can range in size from about 5 to about 30 amino acid residues. Without intending to be bound by theory, VHHs and CDR3 regions that bind to the same CD5 target Ag are considered to have resulted from affinity maturation of a common precursor VHH within the animal and are classified as a ‘homology group.’ Individual VHHs within a homology group are classified by their binding to the target Ag, and the members of the VHH homology group are able to ‘compete’ with each other for binding to the Ag, thus demonstrating that they bind to the same region on the target Ag. In VHH molecules, the CDRs (CDR1, CDR2 and CD3) play a role in the ability of a VHH to bind to the target Ag, e.g., CD5, in conjunction with CDR1 and CDR2.

[0576] Since the FRs maintain the structure of a VHH and the positioning of the CDRs for binding to the target Ag, the FRs of VHHs typically do not vary extensively in sequence (FIG. 1). However, some VHH FR amino acid sequence variation is permissible, particularly in cases in which an amino acid substitution involves the replacement or substitution of one amino acid with another amino acid having similar properties (e.g., similarity in being charged or uncharged), i.e., a conservative substitution. Such conservative changes in FRs can often be found naturally within VHHs that have undergone affinity maturation in an animal. Similar to the case with FRs, VHH CDRs also typically do not vary extensively in amino acid sequence or type so as not to compromise their ability to specifically bind to Ag. As would be appreciated by one skilled in the art, an estimation of the extent of amino acid sequence variation that can be tolerated within VHHs without compromising their Ag binding ability can be made by observing the variation that occurs naturally within affinity-matured homology groups of VHHs isolated from the same types of animals and which bind to the same Ag.

[0577] In an embodiment, sequence variation is particularly acceptable in the CDR regions, e.g., CDR1, CDR2, and/or CDR3, while the feature of VHH binding to antigen CD5 is maintained. In an embodiment, amino acid sequence variation results from conservative amino acid substitutions in a VHH sequence. In an embodiment, the conservative amino acid substitutions are in one or more CDR sequences of the VHH polypeptide. In an embodiment, the conservative amino acid substitutions are in one or more FR sequences of the VHH polypeptide. In an embodiment, the conservative amino acid substitutions are in one or more CDR sequences and in one or more FR sequences of the VHH polypeptide.

[0578] An example evidencing that VHH sequence variation is acceptable within related VHHs having the same Ag binding characteristics is described in Tremblay et al., 2013, Infect Immun 81:4592-4603. In this report, 11 VHH sequences comprise a large homology group with closely related CDR3 sequences, and the unusual property of cross-specific binding to two different Shiga toxins, Stx1 and Stx2. Two of the more distantly related VHH members of this homology group are characterized as having common Ag binding characteristics. These two related VHHs were found to have 32 amino acid changes in the total VHH sequence of 120 or 121 residues. Thus, a 26% variation in amino acid sequence did not adversely affect the common Ag binding properties of the VHH proteins.

### KITS

[0579] The disclosure provides kits for the treatment of a disease or disorder (e.g., a neoplasia such as a lymphoma) in a subject, where the kit contains a CD5-binding polypeptide of the disclosure, or a polynucleotide encoding the same, and a suitable carrier or excipient. In some embodiments, the kit contains a lipid nanoparticle containing a CD5-binding polypeptide of the disclosure, where the CD5-binding polypeptide is conjugated to the lipid nanoparticle. In some cases, the lipid nanoparticle containing the CD5-binding polypeptide further contains a polynucleotide encoding a chimeric antigen receptor.

[0580] The kits may further comprise written instructions for using a CD5-binding polypeptide or lipid nanoparticle conjugated to a CD5-binding polypeptide as described herein. In other embodiments, the instructions include at least one of the following: precautions; warnings; clinical studies; and/or references. The instructions may be printed directly on the container (when present), or as a label applied to the container, or as a separate sheet, pamphlet, card, or folder supplied in or with the container. In a further embodiment, a kit comprises instructions in the form of a label or separate insert (package insert) for suitable operational parameters. In yet another embodiment, the kit comprises one or more containers with appropriate positive and negative controls or control samples, to be used as standard(s) for detection, calibration, or normalization. The kit can further comprise a second container comprising a pharmaceutically-acceptable buffer, such as (sterile) phosphate-buffered saline, Ringer's solution, or dextrose solution. It can further include other materials desirable from a commercial and user standpoint, including other buffers, diluents, filters, needles, syringes, and package inserts with instructions for use.

[0581] The practice of the various aspects and embodiments of the present disclosure employs, unless otherwise indicated, conventional techniques of molecular biology (including recombinant techniques), microbiology, cell biology, biochemistry and immunology, which are well within the purview of the skilled artisan. Such techniques are explained fully in the literature, such as, “Molecular Cloning: A Laboratory Manual”, second edition (Sambrook, 1989); “Oligonucleotide Synthesis” (Gait, 1984); “Animal Cell Culture” (Freshney, 1987); “Methods in Enzymology” “Handbook of Experimental Immunology” (Weir, 1996); “Gene Transfer Vectors for Mammalian Cells” (Miller and Calos, 1987); “Current Protocols in Molecular Biology” (Ausubel, 1987); “PCR: The Polymerase Chain Reaction”, (Mullis, 1994); “Current Protocols in Immunology” (Coligan, 1991). These techniques are applicable to the production of the polynucleotides and polypeptides of the disclosure, and, as such, may be considered in making and practicing the various aspects and embodiments of the disclosure. Particularly useful techniques for particular embodiments will be discussed in the sections that follow.

[0582] The following examples are put forth so as to provide those of ordinary skill in the art with a complete disclosure and description of how to make and use the assay, screening, and therapeutic methods of the disclosure, and are not intended to limit the scope of what the inventors regard as their invention.

### EXAMPLES

### Example 1: Discovery and Characterization of Anti-Cluster of Differentiation 5 (CD5) VHH Antibodies

[0583] Experiments were undertaken to identify and characterize VHH antibodies capable of binding to human and/or cynomolgus CD5 polypeptides by llama and alpaca immunization and phage display panning. Amino acid sequences for antibodies identified are provided in Tables 1A-1C.

[0584] Tables 8A-8C list data obtained using periplasmic extracts (P.E.) from individual clones following phage display panning that expressed VHH antibodies capable of binding to HEK293T cells surface-expressing human or cynomolgus CD5 polypeptides. Table 8A lists the HCDR3 variant families to which antibodies evaluated belonged (see Tables 1A-1C).

[0585] The data of Table 8B was prepared by transiently transfecting HEK293T cells with polynucleotides encoding human CD5 (huCD5) or rhesus macaque (Macaca mulatta) CD5 (rhCD5) DNA using lipofectamine. The cells were resuspended to a final concentration of 1.0E+06 cells/ml in flow cytometry (FACS) buffer and aliquoted in a V-bottom 96-well plate. Periplasmic extract (P.E.) samples and mouse anti-c-myc 9E10 antibody (Roche, Cat nr. 11667203001) were pre-mixed. Cells were incubated with Phapgemid-anti-c-myc mix followed by incubation with goat anti-mouse IgG-APC (Thermo, Cat nr. A-865) in FACS buffer. Analysis was then performed using iQUE3 screener equipment.

[0586] The data of Table 8C was prepared by loading biotinylated human CD5-HIS and biotinylated cynomolgus CD5-HIS onto streptavidin (SA) Octet pins. The SA-human CD5 and the SA-Cyno CD5 bound pins were then dipped into the PE from individual clones so that PE specific for human or cyno CD5 would bind in solution. The off-rates were then calculated by placing the sensor into Octet buffer and PE dissociation was measured versus time.

TABLE 8A
VHH antibodies evaluated and their corresponding
HCDR3 variant families.

| VHH Antibody name | HCDR3 variant family |
|---|---|
| ABTx315 | 1 |
| ABTx316 | 12 |
| ABTx317 | 13 |
| ABTx318 | 15 |
| ABTx319 | 17 |
| ABTx320 | 28 |
| ABTx321 | 43 |
| ABTx322 | 46 |
| ABTx323 | 50 |
| ABTx324 | 57 |
| ABTx325 | 58 |
| ABTx326 | 60 |
| ABTx327 | 63 |
| ABTx328 | 65 |
| ABTx329 | 66 |
| ABTx330 | 67 |
| ABTx331 | 68 |

TABLE 8B
Percent of cells expressing human CD5 or cynomolgus
CD5 that showed binding to the indicated antibodies
present in periplasmic extract.

| VHH Antibody name | Human CD5 Cells | Cynomolgus CD5 Cells |
|---|---|---|
| ABTx315 | 86.41 | 79.06 |
| ABTx316 | 85.80 | 81.74 |
| ABTx317 | 82.83 | 79.49 |
| ABTx318 | 84.90 | 67.14 |
| ABTx319 | 74.76 | 62.65 |
| ABTx320 | 80.30 | 77.73 |
| ABTx321 | 84.87 | 87.65 |
| ABTx322 | 70.12 | 82.33 |
| ABTx323 | 64.13 | 54.56 |
| ABTx324 | 73.33 | 73.15 |
| ABTx325 | 77.43 | 80.03 |
| ABTx326 | 41.58 | 58.43 |
| ABTx327 | 68.03 | 71.70 |
| ABTx328 | 45.39 | 40.66 |
| ABTx329 | 72.02 | 66.48 |
| ABTx330 | 78.60 | 72.02 |
| ABTx331 | 89.20 | 71.85 |

TABLE 8C
Dissociation constants for binding of the indicated
VHH antibodies to human CD5 or cynolmogus CD5.

| | Human | Cynomolgus CD5 |
|---|---|---|
| VHH Antibody name | CD5 kd (s − 1) | kd (s − 1) |
| ABTx315 | 5.66E−04 | 3.45E−04 |
| ABTx316 | 5.40E−03 | 3.43E−02 |
| ABTx317 | 1.31E−02 | 1.18E−01 |
| ABTx318 | 1.38E−02 | 5.46E−02 |
| ABTx319 | 1.16E−02 | 5.31E−02 |
| ABTx320 | 1.37E−03 | 7.57E−04 |
| ABTx321 | 7.70E−03 | 1.36E−02 |
| ABTx322 | 3.31E−04 | 2.80E−03 |
| ABTx323 | 1.38E−04 | 3.47E−04 |
| ABTx324 | 2.71E−03 | 1.77E−02 |
| ABTx325 | 2.70E−03 | 1.43E−02 |
| ABTx326 | 8.25E−04 | 4.15E−03 |
| ABTx327 | 1.95E−02 | 3.29E−02 |
| ABTx328 | 7.04E−05 | 6.34E−05 |
| ABTx329 | 3.72E−04 | 4.88E−04 |
| ABTx330 | 2.31E−03 | 1.02E−02 |
| ABTx331 | 1.45E−02 | 5.57E−02 |

[0587] Binding constants for the anti-CD3 VHH antibodies were measured and are provided in Table 9. Biotinylated human CD5-HIS and biotinylated cynomolgus CD5-HIS were loaded to streptavidin (SA) Octet pins. The SA-human CD5 and the SA-Cyno CD5 bound pins were then dipped into the periplasmic extract (PE) from individual clones so that PE specific for human or cyno CD5 would bind in solution. The off-rates were then calculated by placing the sensor into Octet buffer and PE dissociation was measured versus time. Human/Cynomolgus binding ratios were calculated by dividing the K_{D}(M) of the VHH to the human CD5 with the K_{D}(M) of the VHH binding with cynomolgus CD5 protein.

TABLE 9
Binding constants for the indicated antibodies.

| | huCD5 | | | CynoCD5 | | | |
|---|---|---|---|---|---|---|---|
| Entity | K_{D} (M) | kₐ (1/Ms) | k_{dis} (1/s) | K_{D} (M) | Kₐ (1/Ms) | k_{dis} (1/s) | Hu/Cyno K_{D} |
| ABTx315 | 4.00E−10 | 1.60E+05 | 6.30E−05 | 2.20E−10 | 2.60E+05 | 5.80E−05 | 1.8 |
| ABTx316 | 1.40E−09 | 1.10E+05 | 1.50E−04 | 1.60E−09 | 1.30E+05 | 2.10E−04 | 0.9 |
| ABTx317 | 2.10E−09 | 7.10E+04 | 1.50E−04 | 2.40E−09 | 8.40E+04 | 2.00E−04 | 0.9 |
| ABTx318 | 2.50E−09 | 6.50E+04 | 1.60E−04 | 2.40E−09 | 9.10E+04 | 2.20E−04 | 1 |
| ABTx319 | 1.80E−09 | 7.20E+04 | 1.30E−04 | 2.20E−09 | 9.40E+04 | 2.00E−04 | 0.8 |
| ABTx320 | 2.80E−09 | 6.90E+04 | 1.90E−04 | 2.60E−09 | 7.60E+04 | 2.00E−04 | 1.1 |
| ABTx321 | 2.30E−10 | 2.20E+05 | 5.20E−05 | 3.70E−10 | 2.40E+05 | 8.80E−05 | 0.6 |
| ABTx322 | 1.00E−09 | 9.50E+04 | 1.00E−04 | 1.10E−09 | 9.70E+04 | 1.10E−04 | 0.9 |
| ABTx323 | 1.20E−09 | 9.30E+04 | 1.10E−04 | 1.30E−09 | 8.90E+04 | 1.20E−04 | 0.9 |
| ABTx324 | 1.70E−09 | 9.90E+04 | 1.70E−04 | 2.30E−09 | 7.10E+04 | 1.60E−04 | 0.7 |
| ABTx325 | 1.50E−09 | 9.00E+04 | 1.30E−04 | 1.80E−09 | 6.80E+04 | 1.30E−04 | 0.8 |
| ABTx326 | 2.00E−09 | 7.40E+04 | 1.50E−04 | 2.20E−09 | 6.80E+04 | 1.50E−04 | 0.9 |
| ABTx327 | 2.20E−10 | 1.60E+05 | 3.60E−05 | 7.80E−10 | 1.40E+05 | 1.10E−04 | 0.3 |
| ABTx328 | 3.60E−10 | 2.60E+05 | 9.20E−05 | 9.30E−10 | 1.90E+05 | 1.80E−04 | 0.4 |
| ABTx329 | 6.90E−10 | 1.30E+05 | 9.30E−05 | 1.60E−09 | 1.10E+05 | 1.70E−04 | 0.4 |
| ABTx330 | 6.50E−10 | 1.30E+05 | 8.30E−05 | 1.40E−09 | 1.10E+05 | 1.40E−04 | 0.5 |
| ABTx331 | 1.30E−09 | 9.40E+04 | 1.20E−04 | 2.20E−09 | 7.10E+04 | 1.60E−04 | 0.6 |

[0588] Experiments were undertaken demonstrating that the anti-CD5 VHH antibodies as Fc fusion proteins bound in a dose-dependent manner to Jurkat cells surface-expressing CD5 (FIGS. 1A and 1B). VHH-Fc were serially diluted in FACS buffer and mixed with Jurkat cells for 15 minutes. Cells were washed twice in FACS buffer and then mixed with anti-Human Fc Dylite650 diluted 1:500 and incubated for 10 minutes. Cells were washed twice in FACS buffer and then run on Attune cytometer measuring GMFI on each cell in the RL1 channel. Calculated EC50 values are provided in Tables 10 and 11.

TABLE 10
EC50 values for the indicated anti-CD5 VHH antibodies.

| | ABTx315 | ABTx316 | ABTx317 | ABTx318 | ABTx319 | ABTx326 | 5CAR scFV |
|---|---|---|---|---|---|---|---|
| EC50 | 1.123 | 0.6534 | 0.3411 | 0.3171 | 0.1160 | 1.720 | 0.7960 |

TABLE 11
EC50 values for the indicated anti-CD5 VHH antibodies.

| | ABTx320 | ABTx321 | ABTx322 | ABTx323 | ABTx324 | ABTx325 | ABTx327 | ABTx328 | ABTx329 | ABTx330 | ABTx331 |
|---|---|---|---|---|---|---|---|---|---|---|---|
| EC50 | 2.855 | 3.380 | 4.057 | 3.150 | 2.468 | 2.935 | 3.303 | 1.545 | 2.361 | 22.11 | 2.305 |

[0589] Experiments were undertaken to demonstrate that the anti-CD5 VHH antibodies bound different epitopes on CD5. As shown in FIGS. 2A and 2B, assays were conducted to determine whether or not the anti-CD5 VHH antibodies competed with the antibody UCHT2 for binding to CD5. Using a 32 well high-throughput experiment setting, 18 streptavidin biosensors were loaded with huCD5-BTN, and then all 18 biosensors were contacted in a first association step (see Ab 1 regions of FIGS. 2A and 2B) with UCHT2 antibody for an extended association time to allow binding of the UCHT2 antibody to the human CD5 antibody to reach saturation. For the second association step (see Ab 2 regions of FIGS. 2A and 2B), each biosensor was assigned to one of 17 anti-CD5 VHH-Fcs or UCHT2 to evaluate binding competition. Table 12 provides response units for the anti-CD5 VHH antibodies when competitively binding to CD5 with UCHT2. The lower the response unit, the more UCHT2 interfered with the binding of the VHH, which suggested overlapping epitopes.

TABLE 12
Response units for simultaneous binding of the indicated antibodies
to CD5 together with UCHT2 and relative magnitudes of UCHT2
competitive binding, where “−” indicates undetectable
or minimal competitive binding and increasing numbers of “+”
symbols correspond to increases in competitive binding.

| | | UCHT2 Competitive |
|---|---|---|
| Antibody Name | Response Units | Binding |
| UCHT2 | 0 | +++ |
| ABTx315 | 0.4982 | + |
| ABTx316 | 0.3942 | + |
| ABTx317 | 1.2383 | − |
| ABTx318 | 1.1547 | − |
| ABTx319 | 1.1729 | − |
| ABTx320 | 0.325 | + |
| ABTx321 | 0.0713 | +++ |
| ABTx322 | −0.1367 | +++ |
| ABTx323 | 0.3171 | + |
| ABTx324 | 0.6632 | − |
| ABTx325 | 0.3955 | + |
| ABTx326 | 0.0571 | +++ |
| ABTx327 | 0.025 | +++ |
| ABTx328 | 0.1529 | ++ |
| ABTx329 | 0.2398 | ++ |
| ABTx330 | 0.3673 | + |
| ABTx331 | 0.2321 | ++ |

### OTHER EMBODIMENTS

[0590] From the foregoing description, it will be apparent that variations and modifications may be made to the various aspects and embodiments described herein to adopt them to various usages and conditions. Such embodiments are also within the scope of the following claims.

[0591] The recitation of a listing of elements in any definition of a variable herein includes definitions of that variable as any single element or combination (or subcombination) of listed elements. The recitation of an embodiment herein includes that embodiment as any single embodiment or in combination with any other embodiments or portions thereof.

[0592] All patents and publications mentioned in this specification are herein incorporated by reference to the same extent as if each independent patent and publication was specifically and individually indicated to be incorporated by reference. The disclosure may be related to International Patent Applications No. PCT/US22/75021, PCT/US20/13964, PCT/US20/52822, PCT/US20/18178, PCT/US21/52035, PCT/US22/81241, PCT/US23/67780, PCT/US23/68543, PCT/US23/72911, PCT/US24/18668, PCT/US24/39693, and/or PCT/US2024/020699, the disclosures of which is incorporated herein by reference in their entirety for all purposes.

The application's sequence listing, which the Patent Office published only in electronic form, follows.

SEQUENCE LISTING (717 sequences)

SEQ ID NO: 1 - protein, 167 aa, Escherichia coli
  REGION 1..167: note = misc_feature - TadA*7.10 (ecTadA) polypeptide sequence
MSEVEFSHEYWMRHALTLAKRARDEREVPVGAVLVLNNRVIGEGWNRAIGLHDPTAHAEIMALRQGGLVMQNYRLIDATLYVTFEPCVMCAGAMIHSRIGRVVFGVRNAKTGAAGSLMDVLHYPGMNHRVEITEGILADECAALLCYFFRMPRQVFNAQKKAQSSTD

SEQ ID NO: 2 - DNA, 4092 bp, synthetic construct
  misc_feature 1..4092: note = BhCas12b GGSGGS-ABE8-Xten20at P153 polynucleotide sequence
  misc_feature 1..6: note = Kozak sequence
  misc_feature 7..57: note = Sequence encoding N-terminal nuclear localization signal
  misc_feature 58..513: note = Sequence encoding BhCas12b
  misc_feature 514..531: note = Sequence encoding a linker
  misc_feature 532..1029: note = Sequence encoding TadA*8
  misc_feature 1030..1089: note = Sequence encoding Xten20 linker
  misc_feature 1090..3954: note = Sequence encoding BhCas12b
  misc_feature 3955..4002: note = Sequence encoding C-terminal NLS
  misc_feature 4003..4008: note = Sequence encoding GS linker
  misc_feature 4009..4089: note = Sequence encoding 3x hemagglutinin (HA) tag
  source 1..4092: mol_type = other DNA
gccaccatggccccaaagaagaagcggaaggtcggtatccacggagtcccagcagccgccaccagatccttcatcctgaagatcgagcccaacgaggaagtgaagaaaggcctctggaaaacccacgaggtgctgaaccacggaatcgcctactacatgaatatcctgaagctgatccggcaagaggccatctacgagcaccacgagcaggaccccaagaatcccaagaaggtgtccaaggccgagatccaggccgagctgtgggatttcgtgctgaagatgcagaagtgcaacagcttcacacacgaggtggacaaggacgaggtgttcaacatcctgagagagctgtacgaggaactggtgcccagcagcgtggaaaagaagggcgaagccaaccagctgagcaacaagtttctgtaccctctggtggaccccaacagccagtctggaaagggaacagccagcagcggcagaaagcccagatggtacaacctgaagattgccggcgatcccggaggctctggaggaagctccgaagtcgagttttcccatgagtactggatgagacacgcattgactctcgcaaagagggctcgagatgaacgcgaggtgcccgtgggggcagtactcgtgctcaacaatcgcgtaatcggcgaaggttggaatagggcaatcggactccacgaccccactgcacatgcggaaatcatggcccttcgacagggagggcttgtgatgcagaattatcgactttatgatgcgacgctgtacgtcacgtttgaaccttgcgtaatgtgcgcgggagctatgattcactcccgcattggacgagttgtattcggtgttcgcaacgccaagacgggtgccgcaggttcactgatggacgtgctgcatcatccaggcatgaaccaccgggtagaaatcacagaaggcatattggcggacgaatgtgcggcgctgttgtgtcgtttttttcgcatgcccaggcgggtctttaacgcccagaaaaaagcacaatcctctactgacggctcttctggatctgaaacacctggcacaagcgagagcgccacccctgagagctctggctcctgggaagaagagaagaagaagtgggaagaagataagaaaaaggacccgctggccaagatcctgggcaagctggctgagtacggactgatccctctgttcatcccctacaccgacagcaacgagcccatcgtgaaagaaatcaagtggatggaaaagtcccggaaccagagcgtgcggcggctggataaggacatgttcattcaggccctggaacggttcctgagctgggagagctggaacctgaaagtgaaagaggaatacgagaaggtcgagaaagagtacaagaccctggaagagaggatcaaagaggacatccaggctctgaaggctctggaacagtatgagaaagagcggcaagaacagctgctgcgggacaccctgaacaccaacgagtaccggctgagcaagagaggccttagaggctggcgggaaatcatccagaaatggctgaaaatggacgagaacgagccctccgagaagtacctggaagtgttcaaggactaccagcggaagcaccctagagaggccggcgattacagcgtgtacgagttcctgtccaagaaagagaaccacttcatctggcggaatcaccctgagtacccctacctgtacgccaccttctgcgagatcgacaagaaaaagaaggacgccaagcagcaggccaccttcacactggccgatcctatcaatcaccctctgtgggtccgattcgaggaaagaagcggcagcaacctgaacaagtacagaatcctgaccgagcagctgcacaccgagaagctgaagaaaaagctgacagtgcagctggaccggctgatctaccctacagaatctggcggctgggaagagaagggcaaagtggacattgtgctgctgcccagccggcagttctacaaccagatcttcctggacatcgaggaaaagggcaagcacgccttcacctacaaggatgagagcatcaagttccctctgaagggcacactcggcggagccagagtgcagttcgacagagatcacctgagaagataccctcacaaggtggaaagcggcaacgtgggcagaatctacttcaacatgaccgtgaacatcgagcctacagagtccccagtgtccaagtctctgaagatccaccgggacgacttccccaaggtggtcaacttcaagcccaaagaactgaccgagtggatcaaggacagcaagggcaagaaactgaagtccggcatcgagtccctggaaatcggcctgagagtgatgagcatcgacctgggacagagacaggccgctgccgcctctattttcgaggtggtggatcagaagcccgacatcgaaggcaagctgtttttcccaatcaagggcaccgagctgtatgccgtgcacagagccagcttcaacatcaagctgcccggcgagacactggtcaagagcagagaagtgctgcggaaggccagagaggacaatctgaaactgatgaaccagaagctcaacttcctgcggaacgtgctgcacttccagcagttcgaggacatcaccgagagagagaagcgggtcaccaagtggatcagcagacaagagaacagcgacgtgcccctggtgtaccaggatgagctgatccagatccgcgagctgatgtacaagccttacaaggactgggtcgccttcctgaagcagctccacaagagactggaagtcgagatcggcaaagaagtgaagcactggcggaagtccctgagcgacggaagaaagggcctgtacggcatctccctgaagaacatcgacgagatcgatcggacccggaagttcctgctgagatggtccctgaggcctaccgaacctggcgaagtgcgtagactggaacccggccagagattcgccatcgaccagctgaatcacctgaacgccctgaaagaagatcggctgaagaagatggccaacaccatcatcatgcacgccctgggctactgctacgacgtgcggaagaagaaatggcaggctaagaaccccgcctgccagatcatcctgttcgaggatctgagcaactacaacccctacgaggaaaggtcccgcttcgagaacagcaagctcatgaagtggtccagacgcgagatccccagacaggttgcactgcagggcgagatctatggcctgcaagtgggagaagtgggcgctcagttcagcagcagattccacgccaagacaggcagccctggcatcagatgtagcgtcgtgaccaaagagaagctgcaggacaatcggttcttcaagaatctgcagagagagggcagactgaccctggacaaaatcgccgtgctgaaagagggcgatctgtacccagacaaaggcggcgagaagttcatcagcctgagcaaggatcggaagtgcgtgaccacacacgccgacatcaacgccgctcagaacctgcagaagcggttctggacaagaacccacggcttctacaaggtgtactgcaaggcctaccaggtggacggccagaccgtgtacatccctgagagcaaggaccagaagcagaagatcatcgaagagttcggcgagggctacttcattctgaaggacggggtgtacgaatgggtcaacgccggcaagctgaaaatcaagaagggcagctccaagcagagcagcagcgagctggtggatagcgacatcctgaaagacagcttcgacctggcctccgagctgaaaggcgaaaagctgatgctgtacagggaccccagcggcaatgtgttccccagcgacaaatggatggccgctggcgtgttcttcggaaagctggaacgcatcctgatcagcaagctgaccaaccagtactccatcagcaccatcgaggacgacagcagcaagcagtctatgaaaaggccggcggccacgaaaaaggccggccaggcaaaaaagaaaaagggatcctacccatacgatgttccagattacgcttatccctacgacgtgcctgattatgcatacccatatgatgtccccgactatgcctaa

SEQ ID NO: 3 - protein, 1361 aa, synthetic construct
  REGION 1..1361: note = BhCas12b GGSGGS-ABE8-Xten20at P153 polypeptide sequence
MAPKKKRKVGIHGVPAAATRSFILKIEPNEEVKKGLWKTHEVLNHGIAYYMNILKLIRQEAIYEHHEQDPKNPKKVSKAEIQAELWDFVLKMQKCNSFTHEVDKDEVFNILRELYEELVPSSVEKKGEANQLSNKFLYPLVDPNSQSGKGTASSGRKPRWYNLKIAGDPGGSGGSSEVEFSHEYWMRHALTLAKRARDEREVPVGAVLVLNNRVIGEGWNRAIGLHDPTAHAEIMALRQGGLVMQNYRLYDATLYVTFEPCVMCAGAMIHSRIGRVVFGVRNAKTGAAGSLMDVLHHPGMNHRVEITEGILADECAALLCRFFRMPRRVFNAQKKAQSSTDGSSGSETPGTSESATPESSGSWEEEKKKWEEDKKKDPLAKILGKLAEYGLIPLFIPYTDSNEPIVKEIKWMEKSRNQSVRRLDKDMFIQALERFLSWESWNLKVKEEYEKVEKEYKTLEERIKEDIQALKALEQYEKERQEQLLRDTLNTNEYRLSKRGLRGWREIIQKWLKMDENEPSEKYLEVFKDYQRKHPREAGDYSVYEFLSKKENHFIWRNHPEYPYLYATFCEIDKKKKDAKQQATFTLADPINHPLWVRFEERSGSNLNKYRILTEQLHTEKLKKKLTVQLDRLIYPTESGGWEEKGKVDIVLLPSRQFYNQIFLDIEEKGKHAFTYKDESIKFPLKGTLGGARVQFDRDHLRRYPHKVESGNVGRIYFNMTVNIEPTESPVSKSLKIHRDDFPKVVNFKPKELTEWIKDSKGKKLKSGIESLEIGLRVMSIDLGQRQAAAASIFEVVDQKPDIEGKLFFPIKGTELYAVHRASFNIKLPGETLVKSREVLRKAREDNLKLMNQKLNFLRNVLHFQQFEDITEREKRVTKWISRQENSDVPLVYQDELIQIRELMYKPYKDWVAFLKQLHKRLEVEIGKEVKHWRKSLSDGRKGLYGISLKNIDEIDRTRKFLLRWSLRPTEPGEVRRLEPGQRFAIDQLNHLNALKEDRLKKMANTIIMHALGYCYDVRKKKWQAKNPACQIILFEDLSNYNPYEERSRFENSKLMKWSRREIPRQVALQGEIYGLQVGEVGAQFSSRFHAKTGSPGIRCSVVTKEKLQDNRFFKNLQREGRLTLDKIAVLKEGDLYPDKGGEKFISLSKDRKCVTTHADINAAQNLQKRFWTRTHGFYKVYCKAYQVDGQTVYIPESKDQKQKIIEEFGEGYFILKDGVYEWVNAGKLKIKKGSSKQSSSELVDSDILKDSFDLASELKGEKLMLYRDPSGNVFPSDKWMAAGVFFGKLERILISKLTNQYSISTIEDDSSKQSMKRPAATKKAGQAKKKKGSYPYDVPDYAYPYDVPDYAYPYDVPDYA

SEQ ID NO: 4 - DNA, 4092 bp, synthetic construct
  misc_feature 1..4092: note = BhCas12b GGSGGS-ABE8-Xten20at K255 polynucleotide sequence
  misc_feature 1..6: note = Kozak sequence
  misc_feature 7..57: note = Sequence encoding N-terminal nuclear localization signal (NLS)
  misc_feature 58..822: note = Sequence encoding BhCas12b
  misc_feature 823..840: note = Sequence encoding a linker
  misc_feature 841..1338: note = Sequence encoding TadA*8
  misc_feature 1339..1398: note = Sequence encoding Xten20 linker
  misc_feature 1399..3954: note = Sequence encoding BhCas12b
  misc_feature 3955..4002: note = Sequence encoding C-terminal NLS
  misc_feature 4003..4008: note = Sequence encoding a GS linker
  misc_feature 4009..4089: note = Sequence encoding 3x hemagglutinin (HA) tag
  source 1..4092: mol_type = other DNA
gccaccatggccccaaagaagaagcggaaggtcggtatccacggagtcccagcagccgccaccagatccttcatcctgaagatcgagcccaacgaggaagtgaagaaaggcctctggaaaacccacgaggtgctgaaccacggaatcgcctactacatgaatatcctgaagctgatccggcaagaggccatctacgagcaccacgagcaggaccccaagaatcccaagaaggtgtccaaggccgagatccaggccgagctgtgggatttcgtgctgaagatgcagaagtgcaacagcttcacacacgaggtggacaaggacgaggtgttcaacatcctgagagagctgtacgaggaactggtgcccagcagcgtggaaaagaagggcgaagccaaccagctgagcaacaagtttctgtaccctctggtggaccccaacagccagtctggaaagggaacagccagcagcggcagaaagcccagatggtacaacctgaagattgccggcgatccctcctgggaagaagagaagaagaagtgggaagaagataagaaaaaggacccgctggccaagatcctgggcaagctggctgagtacggactgatccctctgttcatcccctacaccgacagcaacgagcccatcgtgaaagaaatcaagtggatggaaaagtcccggaaccagagcgtgcggcggctggataaggacatgttcattcaggccctggaacggttcctgagctgggagagctggaacctgaaagtgaaagaggaatacgagaaggtcgagaaagagtacaagaccctggaagagaggatcaaaggaggctctggaggaagctccgaagtcgagttttcccatgagtactggatgagacacgcattgactctcgcaaagagggctcgagatgaacgcgaggtgcccgtgggggcagtactcgtgctcaacaatcgcgtaatcggcgaaggttggaatagggcaatcggactccacgaccccactgcacatgcggaaatcatggcccttcgacagggagggcttgtgatgcagaattatcgactttatgatgcgacgctgtacgtcacgtttgaaccttgcgtaatgtgcgcgggagctatgattcactcccgcattggacgagttgtattcggtgttcgcaacgccaagacgggtgccgcaggttcactgatggacgtgctgcatcatccaggcatgaaccaccgggtagaaatcacagaaggcatattggcggacgaatgtgcggcgctgttgtgtcgtttttttcgcatgcccaggcgggtctttaacgcccagaaaaaagcacaatcctctactgacggctcttctggatctgaaacacctggcacaagcgagagcgccacccctgagagctctggcgaggacatccaggctctgaaggctctggaacagtatgagaaagagcggcaagaacagctgctgcgggacaccctgaacaccaacgagtaccggctgagcaagagaggccttagaggctggcgggaaatcatccagaaatggctgaaaatggacgagaacgagccctccgagaagtacctggaagtgttcaaggactaccagcggaagcaccctagagaggccggcgattacagcgtgtacgagttcctgtccaagaaagagaaccacttcatctggcggaatcaccctgagtacccctacctgtacgccaccttctgcgagatcgacaagaaaaagaaggacgccaagcagcaggccaccttcacactggccgatcctatcaatcaccctctgtgggtccgattcgaggaaagaagcggcagcaacctgaacaagtacagaatcctgaccgagcagctgcacaccgagaagctgaagaaaaagctgacagtgcagctggaccggctgatctaccctacagaatctggcggctgggaagagaagggcaaagtggacattgtgctgctgcccagccggcagttctacaaccagatcttcctggacatcgaggaaaagggcaagcacgccttcacctacaaggatgagagcatcaagttccctctgaagggcacactcggcggagccagagtgcagttcgacagagatcacctgagaagataccctcacaaggtggaaagcggcaacgtgggcagaatctacttcaacatgaccgtgaacatcgagcctacagagtccccagtgtccaagtctctgaagatccaccgggacgacttccccaaggtggtcaacttcaagcccaaagaactgaccgagtggatcaaggacagcaagggcaagaaactgaagtccggcatcgagtccctggaaatcggcctgagagtgatgagcatcgacctgggacagagacaggccgctgccgcctctattttcgaggtggtggatcagaagcccgacatcgaaggcaagctgtttttcccaatcaagggcaccgagctgtatgccgtgcacagagccagcttcaacatcaagctgcccggcgagacactggtcaagagcagagaagtgctgcggaaggccagagaggacaatctgaaactgatgaaccagaagctcaacttcctgcggaacgtgctgcacttccagcagttcgaggacatcaccgagagagagaagcgggtcaccaagtggatcagcagacaagagaacagcgacgtgcccctggtgtaccaggatgagctgatccagatccgcgagctgatgtacaagccttacaaggactgggtcgccttcctgaagcagctccacaagagactggaagtcgagatcggcaaagaagtgaagcactggcggaagtccctgagcgacggaagaaagggcctgtacggcatctccctgaagaacatcgacgagatcgatcggacccggaagttcctgctgagatggtccctgaggcctaccgaacctggcgaagtgcgtagactggaacccggccagagattcgccatcgaccagctgaatcacctgaacgccctgaaagaagatcggctgaagaagatggccaacaccatcatcatgcacgccctgggctactgctacgacgtgcggaagaagaaatggcaggctaagaaccccgcctgccagatcatcctgttcgaggatctgagcaactacaacccctacgaggaaaggtcccgcttcgagaacagcaagctcatgaagtggtccagacgcgagatccccagacaggttgcactgcagggcgagatctatggcctgcaagtgggagaagtgggcgctcagttcagcagcagattccacgccaagacaggcagccctggcatcagatgtagcgtcgtgaccaaagagaagctgcaggacaatcggttcttcaagaatctgcagagagagggcagactgaccctggacaaaatcgccgtgctgaaagagggcgatctgtacccagacaaaggcggcgagaagttcatcagcctgagcaaggatcggaagtgcgtgaccacacacgccgacatcaacgccgctcagaacctgcagaagcggttctggacaagaacccacggcttctacaaggtgtactgcaaggcctaccaggtggacggccagaccgtgtacatccctgagagcaaggaccagaagcagaagatcatcgaagagttcggcgagggctacttcattctgaaggacggggtgtacgaatgggtcaacgccggcaagctgaaaatcaagaagggcagctccaagcagagcagcagcgagctggtggatagcgacatcctgaaagacagcttcgacctggcctccgagctgaaaggcgaaaagctgatgctgtacagggaccccagcggcaatgtgttccccagcgacaaatggatggccgctggcgtgttcttcggaaagctggaacgcatcctgatcagcaagctgaccaaccagtactccatcagcaccatcgaggacgacagcagcaagcagtctatgaaaaggccggcggccacgaaaaaggccggccaggcaaaaaagaaaaagggatcctacccatacgatgttccagattacgcttatccctacgacgtgcctgattatgcatacccatatgatgtccccgactatgcctaa

SEQ ID NO: 5 - protein, 1361 aa, synthetic construct
  REGION 1..1361: note = BhCas12b GGSGGS-ABE8-Xten20at K255 polypeptide sequence
MAPKKKRKVGIHGVPAAATRSFILKIEPNEEVKKGLWKTHEVLNHGIAYYMNILKLIRQEAIYEHHEQDPKNPKKVSKAEIQAELWDFVLKMQKCNSFTHEVDKDEVFNILRELYEELVPSSVEKKGEANQLSNKFLYPLVDPNSQSGKGTASSGRKPRWYNLKIAGDPSWEEEKKKWEEDKKKDPLAKILGKLAEYGLIPLFIPYTDSNEPIVKEIKWMEKSRNQSVRRLDKDMFIQALERFLSWESWNLKVKEEYEKVEKEYKTLEERIKGGSGGSSEVEFSHEYWMRHALTLAKRARDEREVPVGAVLVLNNRVIGEGWNRAIGLHDPTAHAEIMALRQGGLVMQNYRLYDATLYVTFEPCVMCAGAMIHSRIGRVVFGVRNAKTGAAGSLMDVLHHPGMNHRVEITEGILADECAALLCRFFRMPRRVFNAQKKAQSSTDGSSGSETPGTSESATPESSGEDIQALKALEQYEKERQEQLLRDTLNTNEYRLSKRGLRGWREIIQKWLKMDENEPSEKYLEVFKDYQRKHPREAGDYSVYEFLSKKENHFIWRNHPEYPYLYATFCEIDKKKKDAKQQATFTLADPINHPLWVRFEERSGSNLNKYRILTEQLHTEKLKKKLTVQLDRLIYPTESGGWEEKGKVDIVLLPSRQFYNQIFLDIEEKGKHAFTYKDESIKFPLKGTLGGARVQFDRDHLRRYPHKVESGNVGRIYFNMTVNIEPTESPVSKSLKIHRDDFPKVVNFKPKELTEWIKDSKGKKLKSGIESLEIGLRVMSIDLGQRQAAAASIFEVVDQKPDIEGKLFFPIKGTELYAVHRASFNIKLPGETLVKSREVLRKAREDNLKLMNQKLNFLRNVLHFQQFEDITEREKRVTKWISRQENSDVPLVYQDELIQIRELMYKPYKDWVAFLKQLHKRLEVEIGKEVKHWRKSLSDGRKGLYGISLKNIDEIDRTRKFLLRWSLRPTEPGEVRRLEPGQRFAIDQLNHLNALKEDRLKKMANTIIMHALGYCYDVRKKKWQAKNPACQIILFEDLSNYNPYEERSRFENSKLMKWSRREIPRQVALQGEIYGLQVGEVGAQFSSRFHAKTGSPGIRCSVVTKEKLQDNRFFKNLQREGRLTLDKIAVLKEGDLYPDKGGEKFISLSKDRKCVTTHADINAAQNLQKRFWTRTHGFYKVYCKAYQVDGQTVYIPESKDQKQKIIEEFGEGYFILKDGVYEWVNAGKLKIKKGSSKQSSSELVDSDILKDSFDLASELKGEKLMLYRDPSGNVFPSDKWMAAGVFFGKLERILISKLTNQYSISTIEDDSSKQSMKRPAATKKAGQAKKKKGSYPYDVPDYAYPYDVPDYAYPYDVPDYA

SEQ ID NO: 6 - DNA, 4092 bp, synthetic construct
  misc_feature 1..4092: note = BhCas12b GGSGGS-ABE8-Xten20at D306 polynucleotide sequence
  misc_feature 1..6: note = Kozak sequence
  misc_feature 7..57: note = Sequence encoding N-terminal nuclear localization signal (NLS)
  misc_feature 58..975: note = Sequence encoding BhCas12b
  misc_feature 976..993: note = Sequence encoding a linker
  misc_feature 994..1491: note = Sequence encoding TadA*8
  misc_feature 1492..1551: note = Sequence encoding Xten20 linker
  misc_feature 1552..3954: note = Sequence encoding BhCas12b
  misc_feature 3955..4002: note = Sequence encoding C-terminal NLS
  misc_feature 4003..4008: note = Sequence encoding a GS linker
  misc_feature 4009..4089: note = Sequence encoding 3x hemagglutinin (HA) tag
  source 1..4092: mol_type = other DNA
gccaccatggccccaaagaagaagcggaaggtcggtatccacggagtcccagcagccgccaccagatccttcatcctgaagatcgagcccaacgaggaagtgaagaaaggcctctggaaaacccacgaggtgctgaaccacggaatcgcctactacatgaatatcctgaagctgatccggcaagaggccatctacgagcaccacgagcaggaccccaagaatcccaagaaggtgtccaaggccgagatccaggccgagctgtgggatttcgtgctgaagatgcagaagtgcaacagcttcacacacgaggtggacaaggacgaggtgttcaacatcctgagagagctgtacgaggaactggtgcccagcagcgtggaaaagaagggcgaagccaaccagctgagcaacaagtttctgtaccctctggtggaccccaacagccagtctggaaagggaacagccagcagcggcagaaagcccagatggtacaacctgaagattgccggcgatccctcctgggaagaagagaagaagaagtgggaagaagataagaaaaaggacccgctggccaagatcctgggcaagctggctgagtacggactgatccctctgttcatcccctacaccgacagcaacgagcccatcgtgaaagaaatcaagtggatggaaaagtcccggaaccagagcgtgcggcggctggataaggacatgttcattcaggccctggaacggttcctgagctgggagagctggaacctgaaagtgaaagaggaatacgagaaggtcgagaaagagtacaagaccctggaagagaggatcaaagaggacatccaggctctgaaggctctggaacagtatgagaaagagcggcaagaacagctgctgcgggacaccctgaacaccaacgagtaccggctgagcaagagaggccttagaggctggcgggaaatcatccagaaatggctgaaaatggacggaggctctggaggaagctccgaagtcgagttttcccatgagtactggatgagacacgcattgactctcgcaaagagggctcgagatgaacgcgaggtgcccgtgggggcagtactcgtgctcaacaatcgcgtaatcggcgaaggttggaatagggcaatcggactccacgaccccactgcacatgcggaaatcatggcccttcgacagggagggcttgtgatgcagaattatcgactttatgatgcgacgctgtacgtcacgtttgaaccttgcgtaatgtgcgcgggagctatgattcactcccgcattggacgagttgtattcggtgttcgcaacgccaagacgggtgccgcaggttcactgatggacgtgctgcatcatccaggcatgaaccaccgggtagaaatcacagaaggcatattggcggacgaatgtgcggcgctgttgtgtcgtttttttcgcatgcccaggcgggtctttaacgcccagaaaaaagcacaatcctctactgacggctcttctggatctgaaacacctggcacaagcgagagcgccacccctgagagctctggcgagaacgagccctccgagaagtacctggaagtgttcaaggactaccagcggaagcaccctagagaggccggcgattacagcgtgtacgagttcctgtccaagaaagagaaccacttcatctggcggaatcaccctgagtacccctacctgtacgccaccttctgcgagatcgacaagaaaaagaaggacgccaagcagcaggccaccttcacactggccgatcctatcaatcaccctctgtgggtccgattcgaggaaagaagcggcagcaacctgaacaagtacagaatcctgaccgagcagctgcacaccgagaagctgaagaaaaagctgacagtgcagctggaccggctgatctaccctacagaatctggcggctgggaagagaagggcaaagtggacattgtgctgctgcccagccggcagttctacaaccagatcttcctggacatcgaggaaaagggcaagcacgccttcacctacaaggatgagagcatcaagttccctctgaagggcacactcggcggagccagagtgcagttcgacagagatcacctgagaagataccctcacaaggtggaaagcggcaacgtgggcagaatctacttcaacatgaccgtgaacatcgagcctacagagtccccagtgtccaagtctctgaagatccaccgggacgacttccccaaggtggtcaacttcaagcccaaagaactgaccgagtggatcaaggacagcaagggcaagaaactgaagtccggcatcgagtccctggaaatcggcctgagagtgatgagcatcgacctgggacagagacaggccgctgccgcctctattttcgaggtggtggatcagaagcccgacatcgaaggcaagctgtttttcccaatcaagggcaccgagctgtatgccgtgcacagagccagcttcaacatcaagctgcccggcgagacactggtcaagagcagagaagtgctgcggaaggccagagaggacaatctgaaactgatgaaccagaagctcaacttcctgcggaacgtgctgcacttccagcagttcgaggacatcaccgagagagagaagcgggtcaccaagtggatcagcagacaagagaacagcgacgtgcccctggtgtaccaggatgagctgatccagatccgcgagctgatgtacaagccttacaaggactgggtcgccttcctgaagcagctccacaagagactggaagtcgagatcggcaaagaagtgaagcactggcggaagtccctgagcgacggaagaaagggcctgtacggcatctccctgaagaacatcgacgagatcgatcggacccggaagttcctgctgagatggtccctgaggcctaccgaacctggcgaagtgcgtagactggaacccggccagagattcgccatcgaccagctgaatcacctgaacgccctgaaagaagatcggctgaagaagatggccaacaccatcatcatgcacgccctgggctactgctacgacgtgcggaagaagaaatggcaggctaagaaccccgcctgccagatcatcctgttcgaggatctgagcaactacaacccctacgaggaaaggtcccgcttcgagaacagcaagctcatgaagtggtccagacgcgagatccccagacaggttgcactgcagggcgagatctatggcctgcaagtgggagaagtgggcgctcagttcagcagcagattccacgccaagacaggcagccctggcatcagatgtagcgtcgtgaccaaagagaagctgcaggacaatcggttcttcaagaatctgcagagagagggcagactgaccctggacaaaatcgccgtgctgaaagagggcgatctgtacccagacaaaggcggcgagaagttcatcagcctgagcaaggatcggaagtgcgtgaccacacacgccgacatcaacgccgctcagaacctgcagaagcggttctggacaagaacccacggcttctacaaggtgtactgcaaggcctaccaggtggacggccagaccgtgtacatccctgagagcaaggaccagaagcagaagatcatcgaagagttcggcgagggctacttcattctgaaggacggggtgtacgaatgggtcaacgccggcaagctgaaaatcaagaagggcagctccaagcagagcagcagcgagctggtggatagcgacatcctgaaagacagcttcgacctggcctccgagctgaaaggcgaaaagctgatgctgtacagggaccccagcggcaatgtgttccccagcgacaaatggatggccgctggcgtgttcttcggaaagctggaacgcatcctgatcagcaagctgaccaaccagtactccatcagcaccatcgaggacgacagcagcaagcagtctatgaaaaggccggcggccacgaaaaaggccggccaggcaaaaaagaaaaagggatcctacccatacgatgttccagattacgcttatccctacgacgtgcctgattatgcatacccatatgatgtccccgactatgcctaa

SEQ ID NO: 7 - protein, 1361 aa, synthetic construct
  REGION 1..1361: note = BhCas12b GGSGGS-ABE8-Xten20at D306 polypeptide sequence
MAPKKKRKVGIHGVPAAATRSFILKIEPNEEVKKGLWKTHEVLNHGIAYYMNILKLIRQEAIYEHHEQDPKNPKKVSKAEIQAELWDFVLKMQKCNSFTHEVDKDEVFNILRELYEELVPSSVEKKGEANQLSNKFLYPLVDPNSQSGKGTASSGRKPRWYNLKIAGDPSWEEEKKKWEEDKKKDPLAKILGKLAEYGLIPLFIPYTDSNEPIVKEIKWMEKSRNQSVRRLDKDMFIQALERFLSWESWNLKVKEEYEKVEKEYKTLEERIKEDIQALKALEQYEKERQEQLLRDTLNTNEYRLSKRGLRGWREIIQKWLKMDGGSGGSSEVEFSHEYWMRHALTLAKRARDEREVPVGAVLVLNNRVIGEGWNRAIGLHDPTAHAEIMALRQGGLVMQNYRLYDATLYVTFEPCVMCAGAMIHSRIGRVVFGVRNAKTGAAGSLMDVLHHPGMNHRVEITEGILADECAALLCRFFRMPRRVFNAQKKAQSSTDGSSGSETPGTSESATPESSGENEPSEKYLEVFKDYQRKHPREAGDYSVYEFLSKKENHFIWRNHPEYPYLYATFCEIDKKKKDAKQQATFTLADPINHPLWVRFEERSGSNLNKYRILTEQLHTEKLKKKLTVQLDRLIYPTESGGWEEKGKVDIVLLPSRQFYNQIFLDIEEKGKHAFTYKDESIKFPLKGTLGGARVQFDRDHLRRYPHKVESGNVGRIYFNMTVNIEPTESPVSKSLKIHRDDFPKVVNFKPKELTEWIKDSKGKKLKSGIESLEIGLRVMSIDLGQRQAAAASIFEVVDQKPDIEGKLFFPIKGTELYAVHRASFNIKLPGETLVKSREVLRKAREDNLKLMNQKLNFLRNVLHFQQFEDITEREKRVTKWISRQENSDVPLVYQDELIQIRELMYKPYKDWVAFLKQLHKRLEVEIGKEVKHWRKSLSDGRKGLYGISLKNIDEIDRTRKFLLRWSLRPTEPGEVRRLEPGQRFAIDQLNHLNALKEDRLKKMANTIIMHALGYCYDVRKKKWQAKNPACQIILFEDLSNYNPYEERSRFENSKLMKWSRREIPRQVALQGEIYGLQVGEVGAQFSSRFHAKTGSPGIRCSVVTKEKLQDNRFFKNLQREGRLTLDKIAVLKEGDLYPDKGGEKFISLSKDRKCVTTHADINAAQNLQKRFWTRTHGFYKVYCKAYQVDGQTVYIPESKDQKQKIIEEFGEGYFILKDGVYEWVNAGKLKIKKGSSKQSSSELVDSDILKDSFDLASELKGEKLMLYRDPSGNVFPSDKWMAAGVFFGKLERILISKLTNQYSISTIEDDSSKQSMKRPAATKKAGQAKKKKGSYPYDVPDYAYPYDVPDYAYPYDVPDYA

SEQ ID NO: 8 - DNA, 4092 bp, synthetic construct
  misc_feature 1..4092: note = BhCas12b GGSGGS-ABE8-Xten20at D980 polynucleotide sequence
  misc_feature 1..6: note = Kozak sequence
  misc_feature 7..57: note = Sequence encoding N-terminal nuclear localization signal (NLS)
  misc_feature 58..2997: note = Sequence encoding BhCas12b
  misc_feature 2998..3015: note = Sequence encoding a linker
  misc_feature 3016..3513: note = Sequence encoding TadA*8
  misc_feature 3514..3573: note = Sequence encoding Xten20 linker
  misc_feature 3574..3954: note = Sequence encoding BhCas12b
  misc_feature 3955..4002: note = Sequence encoding C-terminal NLS
  misc_feature 4003..4008: note = Sequence encoding a GS linker
  misc_feature 4009..4089: note = Sequence encoding 3x hemagglutinin (HA) tag
  source 1..4092: mol_type = other DNA
gccaccatggccccaaagaagaagcggaaggtcggtatccacggagtcccagcagccgccaccagatccttcatcctgaagatcgagcccaacgaggaagtgaagaaaggcctctggaaaacccacgaggtgctgaaccacggaatcgcctactacatgaatatcctgaagctgatccggcaagaggccatctacgagcaccacgagcaggaccccaagaatcccaagaaggtgtccaaggccgagatccaggccgagctgtgggatttcgtgctgaagatgcagaagtgcaacagcttcacacacgaggtggacaaggacgaggtgttcaacatcctgagagagctgtacgaggaactggtgcccagcagcgtggaaaagaagggcgaagccaaccagctgagcaacaagtttctgtaccctctggtggaccccaacagccagtctggaaagggaacagccagcagcggcagaaagcccagatggtacaacctgaagattgccggcgatccctcctgggaagaagagaagaagaagtgggaagaagataagaaaaaggacccgctggccaagatcctgggcaagctggctgagtacggactgatccctctgttcatcccctacaccgacagcaacgagcccatcgtgaaagaaatcaagtggatggaaaagtcccggaaccagagcgtgcggcggctggataaggacatgttcattcaggccctggaacggttcctgagctgggagagctggaacctgaaagtgaaagaggaatacgagaaggtcgagaaagagtacaagaccctggaagagaggatcaaagaggacatccaggctctgaaggctctggaacagtatgagaaagagcggcaagaacagctgctgcgggacaccctgaacaccaacgagtaccggctgagcaagagaggccttagaggctggcgggaaatcatccagaaatggctgaaaatggacgagaacgagccctccgagaagtacctggaagtgttcaaggactaccagcggaagcaccctagagaggccggcgattacagcgtgtacgagttcctgtccaagaaagagaaccacttcatctggcggaatcaccctgagtacccctacctgtacgccaccttctgcgagatcgacaagaaaaagaaggacgccaagcagcaggccaccttcacactggccgatcctatcaatcaccctctgtgggtccgattcgaggaaagaagcggcagcaacctgaacaagtacagaatcctgaccgagcagctgcacaccgagaagctgaagaaaaagctgacagtgcagctggaccggctgatctaccctacagaatctggcggctgggaagagaagggcaaagtggacattgtgctgctgcccagccggcagttctacaaccagatcttcctggacatcgaggaaaagggcaagcacgccttcacctacaaggatgagagcatcaagttccctctgaagggcacactcggcggagccagagtgcagttcgacagagatcacctgagaagataccctcacaaggtggaaagcggcaacgtgggcagaatctacttcaacatgaccgtgaacatcgagcctacagagtccccagtgtccaagtctctgaagatccaccgggacgacttccccaaggtggtcaacttcaagcccaaagaactgaccgagtggatcaaggacagcaagggcaagaaactgaagtccggcatcgagtccctggaaatcggcctgagagtgatgagcatcgacctgggacagagacaggccgctgccgcctctattttcgaggtggtggatcagaagcccgacatcgaaggcaagctgtttttcccaatcaagggcaccgagctgtatgccgtgcacagagccagcttcaacatcaagctgcccggcgagacactggtcaagagcagagaagtgctgcggaaggccagagaggacaatctgaaactgatgaaccagaagctcaacttcctgcggaacgtgctgcacttccagcagttcgaggacatcaccgagagagagaagcgggtcaccaagtggatcagcagacaagagaacagcgacgtgcccctggtgtaccaggatgagctgatccagatccgcgagctgatgtacaagccttacaaggactgggtcgccttcctgaagcagctccacaagagactggaagtcgagatcggcaaagaagtgaagcactggcggaagtccctgagcgacggaagaaagggcctgtacggcatctccctgaagaacatcgacgagatcgatcggacccggaagttcctgctgagatggtccctgaggcctaccgaacctggcgaagtgcgtagactggaacccggccagagattcgccatcgaccagctgaatcacctgaacgccctgaaagaagatcggctgaagaagatggccaacaccatcatcatgcacgccctgggctactgctacgacgtgcggaagaagaaatggcaggctaagaaccccgcctgccagatcatcctgttcgaggatctgagcaactacaacccctacgaggaaaggtcccgcttcgagaacagcaagctcatgaagtggtccagacgcgagatccccagacaggttgcactgcagggcgagatctatggcctgcaagtgggagaagtgggcgctcagttcagcagcagattccacgccaagacaggcagccctggcatcagatgtagcgtcgtgaccaaagagaagctgcaggacaatcggttcttcaagaatctgcagagagagggcagactgaccctggacaaaatcgccgtgctgaaagagggcgatctgtacccagacaaaggcggcgagaagttcatcagcctgagcaaggatcggaagtgcgtgaccacacacgccgacatcaacgccgctcagaacctgcagaagcggttctggacaagaacccacggcttctacaaggtgtactgcaaggcctaccaggtggacggaggctctggaggaagctccgaagtcgagttttcccatgagtactggatgagacacgcattgactctcgcaaagagggctcgagatgaacgcgaggtgcccgtgggggcagtactcgtgctcaacaatcgcgtaatcggcgaaggttggaatagggcaatcggactccacgaccccactgcacatgcggaaatcatggcccttcgacagggagggcttgtgatgcagaattatcgactttatgatgcgacgctgtacgtcacgtttgaaccttgcgtaatgtgcgcgggagctatgattcactcccgcattggacgagttgtattcggtgttcgcaacgccaagacgggtgccgcaggttcactgatggacgtgctgcatcatccaggcatgaaccaccgggtagaaatcacagaaggcatattggcggacgaatgtgcggcgctgttgtgtcgtttttttcgcatgcccaggcgggtctttaacgcccagaaaaaagcacaatcctctactgacggctcttctggatctgaaacacctggcacaagcgagagcgccacccctgagagctctggcggccagaccgtgtacatccctgagagcaaggaccagaagcagaagatcatcgaagagttcggcgagggctacttcattctgaaggacggggtgtacgaatgggtcaacgccggcaagctgaaaatcaagaagggcagctccaagcagagcagcagcgagctggtggatagcgacatcctgaaagacagcttcgacctggcctccgagctgaaaggcgaaaagctgatgctgtacagggaccccagcggcaatgtgttccccagcgacaaatggatggccgctggcgtgttcttcggaaagctggaacgcatcctgatcagcaagctgaccaaccagtactccatcagcaccatcgaggacgacagcagcaagcagtctatgaaaaggccggcggccacgaaaaaggccggccaggcaaaaaagaaaaagggatcctacccatacgatgttccagattacgcttatccctacgacgtgcctgattatgcatacccatatgatgtccccgactatgcctaa

SEQ ID NO: 9 - protein, 1361 aa, synthetic construct
  REGION 1..1361: note = BhCas12b GGSGGS-ABE8-Xten20at D980 polypeptide sequence
MAPKKKRKVGIHGVPAAATRSFILKIEPNEEVKKGLWKTHEVLNHGIAYYMNILKLIRQEAIYEHHEQDPKNPKKVSKAEIQAELWDFVLKMQKCNSFTHEVDKDEVFNILRELYEELVPSSVEKKGEANQLSNKFLYPLVDPNSQSGKGTASSGRKPRWYNLKIAGDPSWEEEKKKWEEDKKKDPLAKILGKLAEYGLIPLFIPYTDSNEPIVKEIKWMEKSRNQSVRRLDKDMFIQALERFLSWESWNLKVKEEYEKVEKEYKTLEERIKEDIQALKALEQYEKERQEQLLRDTLNTNEYRLSKRGLRGWREIIQKWLKMDENEPSEKYLEVFKDYQRKHPREAGDYSVYEFLSKKENHFIWRNHPEYPYLYATFCEIDKKKKDAKQQATFTLADPINHPLWVRFEERSGSNLNKYRILTEQLHTEKLKKKLTVQLDRLIYPTESGGWEEKGKVDIVLLPSRQFYNQIFLDIEEKGKHAFTYKDESIKFPLKGTLGGARVQFDRDHLRRYPHKVESGNVGRIYFNMTVNIEPTESPVSKSLKIHRDDFPKVVNFKPKELTEWIKDSKGKKLKSGIESLEIGLRVMSIDLGQRQAAAASIFEVVDQKPDIEGKLFFPIKGTELYAVHRASFNIKLPGETLVKSREVLRKAREDNLKLMNQKLNFLRNVLHFQQFEDITEREKRVTKWISRQENSDVPLVYQDELIQIRELMYKPYKDWVAFLKQLHKRLEVEIGKEVKHWRKSLSDGRKGLYGISLKNIDEIDRTRKFLLRWSLRPTEPGEVRRLEPGQRFAIDQLNHLNALKEDRLKKMANTIIMHALGYCYDVRKKKWQAKNPACQIILFEDLSNYNPYEERSRFENSKLMKWSRREIPRQVALQGEIYGLQVGEVGAQFSSRFHAKTGSPGIRCSVVTKEKLQDNRFFKNLQREGRLTLDKIAVLKEGDLYPDKGGEKFISLSKDRKCVTTHADINAAQNLQKRFWTRTHGFYKVYCKAYQVDGGSGGSSEVEFSHEYWMRHALTLAKRARDEREVPVGAVLVLNNRVIGEGWNRAIGLHDPTAHAEIMALRQGGLVMQNYRLYDATLYVTFEPCVMCAGAMIHSRIGRVVFGVRNAKTGAAGSLMDVLHHPGMNHRVEITEGILADECAALLCRFFRMPRRVFNAQKKAQSSTDGSSGSETPGTSESATPESSGGQTVYIPESKDQKQKIIEEFGEGYFILKDGVYEWVNAGKLKIKKGSSKQSSSELVDSDILKDSFDLASELKGEKLMLYRDPSGNVFPSDKWMAAGVFFGKLERILISKLTNQYSISTIEDDSSKQSMKRPAATKKAGQAKKKKGSYPYDVPDYAYPYDVPDYAYPYDVPDYA

SEQ ID NO: 10 - DNA, 4092 bp, synthetic construct
  misc_feature 1..4092: note = BhCas12b GGSGGS-ABE8-Xten20at K1019 polynucleotide sequence
  misc_feature 1..6: note = Kozak sequence
  misc_feature 7..57: note = Sequence encoding N-terminal nuclear localization signal (NLS)
  misc_feature 58..3114: note = Sequence encoding BhCas12b
  misc_feature 3115..3132: note = Sequence encoding a linker
  misc_feature 3133..3630: note = Sequence encoding TadA*8
  misc_feature 3631..3690: note = Sequence encoding Xten20 linker
  misc_feature 3691..3954: note = Sequence encoding BhCas12b
  misc_feature 3955..4002: note = Sequence encoding C-terminal NLS
  misc_feature 4003..4008: note = Sequence encoding GS linker
  misc_feature 4009..4089: note = Sequence encoding 3x hemagglutinin (HA) tag
  source 1..4092: mol_type = other DNA
gccaccatggccccaaagaagaagcggaaggtcggtatccacggagtcccagcagccgccaccagatccttcatcctgaagatcgagcccaacgaggaagtgaagaaaggcctctggaaaacccacgaggtgctgaaccacggaatcgcctactacatgaatatcctgaagctgatccggcaagaggccatctacgagcaccacgagcaggaccccaagaatcccaagaaggtgtccaaggccgagatccaggccgagctgtgggatttcgtgctgaagatgcagaagtgcaacagcttcacacacgaggtggacaaggacgaggtgttcaacatcctgagagagctgtacgaggaactggtgcccagcagcgtggaaaagaagggcgaagccaaccagctgagcaacaagtttctgtaccctctggtggaccccaacagccagtctggaaagggaacagccagcagcggcagaaagcccagatggtacaacctgaagattgccggcgatccctcctgggaagaagagaagaagaagtgggaagaagataagaaaaaggacccgctggccaagatcctgggcaagctggctgagtacggactgatccctctgttcatcccctacaccgacagcaacgagcccatcgtgaaagaaatcaagtggatggaaaagtcccggaaccagagcgtgcggcggctggataaggacatgttcattcaggccctggaacggttcctgagctgggagagctggaacctgaaagtgaaagaggaatacgagaaggtcgagaaagagtacaagaccctggaagagaggatcaaagaggacatccaggctctgaaggctctggaacagtatgagaaagagcggcaagaacagctgctgcgggacaccctgaacaccaacgagtaccggctgagcaagagaggccttagaggctggcgggaaatcatccagaaatggctgaaaatggacgagaacgagccctccgagaagtacctggaagtgttcaaggactaccagcggaagcaccctagagaggccggcgattacagcgtgtacgagttcctgtccaagaaagagaaccacttcatctggcggaatcaccctgagtacccctacctgtacgccaccttctgcgagatcgacaagaaaaagaaggacgccaagcagcaggccaccttcacactggccgatcctatcaatcaccctctgtgggtccgattcgaggaaagaagcggcagcaacctgaacaagtacagaatcctgaccgagcagctgcacaccgagaagctgaagaaaaagctgacagtgcagctggaccggctgatctaccctacagaatctggcggctgggaagagaagggcaaagtggacattgtgctgctgcccagccggcagttctacaaccagatcttcctggacatcgaggaaaagggcaagcacgccttcacctacaaggatgagagcatcaagttccctctgaagggcacactcggcggagccagagtgcagttcgacagagatcacctgagaagataccctcacaaggtggaaagcggcaacgtgggcagaatctacttcaacatgaccgtgaacatcgagcctacagagtccccagtgtccaagtctctgaagatccaccgggacgacttccccaaggtggtcaacttcaagcccaaagaactgaccgagtggatcaaggacagcaagggcaagaaactgaagtccggcatcgagtccctggaaatcggcctgagagtgatgagcatcgacctgggacagagacaggccgctgccgcctctattttcgaggtggtggatcagaagcccgacatcgaaggcaagctgtttttcccaatcaagggcaccgagctgtatgccgtgcacagagccagcttcaacatcaagctgcccggcgagacactggtcaagagcagagaagtgctgcggaaggccagagaggacaatctgaaactgatgaaccagaagctcaacttcctgcggaacgtgctgcacttccagcagttcgaggacatcaccgagagagagaagcgggtcaccaagtggatcagcagacaagagaacagcgacgtgcccctggtgtaccaggatgagctgatccagatccgcgagctgatgtacaagccttacaaggactgggtcgccttcctgaagcagctccacaagagactggaagtcgagatcggcaaagaagtgaagcactggcggaagtccctgagcgacggaagaaagggcctgtacggcatctccctgaagaacatcgacgagatcgatcggacccggaagttcctgctgagatggtccctgaggcctaccgaacctggcgaagtgcgtagactggaacccggccagagattcgccatcgaccagctgaatcacctgaacgccctgaaagaagatcggctgaagaagatggccaacaccatcatcatgcacgccctgggctactgctacgacgtgcggaagaagaaatggcaggctaagaaccccgcctgccagatcatcctgttcgaggatctgagcaactacaacccctacgaggaaaggtcccgcttcgagaacagcaagctcatgaagtggtccagacgcgagatccccagacaggttgcactgcagggcgagatctatggcctgcaagtgggagaagtgggcgctcagttcagcagcagattccacgccaagacaggcagccctggcatcagatgtagcgtcgtgaccaaagagaagctgcaggacaatcggttcttcaagaatctgcagagagagggcagactgaccctggacaaaatcgccgtgctgaaagagggcgatctgtacccagacaaaggcggcgagaagttcatcagcctgagcaaggatcggaagtgcgtgaccacacacgccgacatcaacgccgctcagaacctgcagaagcggttctggacaagaacccacggcttctacaaggtgtactgcaaggcctaccaggtggacggccagaccgtgtacatccctgagagcaaggaccagaagcagaagatcatcgaagagttcggcgagggctacttcattctgaaggacggggtgtacgaatgggtcaacgccggcaagggaggctctggaggaagctccgaagtcgagttttcccatgagtactggatgagacacgcattgactctcgcaaagagggctcgagatgaacgcgaggtgcccgtgggggcagtactcgtgctcaacaatcgcgtaatcggcgaaggttggaatagggcaatcggactccacgaccccactgcacatgcggaaatcatggcccttcgacagggagggcttgtgatgcagaattatcgactttatgatgcgacgctgtacgtcacgtttgaaccttgcgtaatgtgcgcgggagctatgattcactcccgcattggacgagttgtattcggtgttcgcaacgccaagacgggtgccgcaggttcactgatggacgtgctgcatcatccaggcatgaaccaccgggtagaaatcacagaaggcatattggcggacgaatgtgcggcgctgttgtgtcgtttttttcgcatgcccaggcgggtctttaacgcccagaaaaaagcacaatcctctactgacggctcttctggatctgaaacacctggcacaagcgagagcgccacccctgagagctctggcctgaaaatcaagaagggcagctccaagcagagcagcagcgagctggtggatagcgacatcctgaaagacagcttcgacctggcctccgagctgaaaggcgaaaagctgatgctgtacagggaccccagcggcaatgtgttccccagcgacaaatggatggccgctggcgtgttcttcggaaagctggaacgcatcctgatcagcaagctgaccaaccagtactccatcagcaccatcgaggacgacagcagcaagcagtctatgaaaaggccggcggccacgaaaaaggccggccaggcaaaaaagaaaaagggatcctacccatacgatgttccagattacgcttatccctacgacgtgcctgattatgcatacccatatgatgtccccgactatgcctaa

SEQ ID NO: 11 - protein, 1361 aa, synthetic construct
  REGION 1..1361: note = BhCas12b GGSGGS-ABE8-Xten20at K1019 polypeptide sequence
MAPKKKRKVGIHGVPAAATRSFILKIEPNEEVKKGLWKTHEVLNHGIAYYMNILKLIRQEAIYEHHEQDPKNPKKVSKAEIQAELWDFVLKMQKCNSFTHEVDKDEVFNILRELYEELVPSSVEKKGEANQLSNKFLYPLVDPNSQSGKGTASSGRKPRWYNLKIAGDPSWEEEKKKWEEDKKKDPLAKILGKLAEYGLIPLFIPYTDSNEPIVKEIKWMEKSRNQSVRRLDKDMFIQALERFLSWESWNLKVKEEYEKVEKEYKTLEERIKEDIQALKALEQYEKERQEQLLRDTLNTNEYRLSKRGLRGWREIIQKWLKMDENEPSEKYLEVFKDYQRKHPREAGDYSVYEFLSKKENHFIWRNHPEYPYLYATFCEIDKKKKDAKQQATFTLADPINHPLWVRFEERSGSNLNKYRILTEQLHTEKLKKKLTVQLDRLIYPTESGGWEEKGKVDIVLLPSRQFYNQIFLDIEEKGKHAFTYKDESIKFPLKGTLGGARVQFDRDHLRRYPHKVESGNVGRIYFNMTVNIEPTESPVSKSLKIHRDDFPKVVNFKPKELTEWIKDSKGKKLKSGIESLEIGLRVMSIDLGQRQAAAASIFEVVDQKPDIEGKLFFPIKGTELYAVHRASFNIKLPGETLVKSREVLRKAREDNLKLMNQKLNFLRNVLHFQQFEDITEREKRVTKWISRQENSDVPLVYQDELIQIRELMYKPYKDWVAFLKQLHKRLEVEIGKEVKHWRKSLSDGRKGLYGISLKNIDEIDRTRKFLLRWSLRPTEPGEVRRLEPGQRFAIDQLNHLNALKEDRLKKMANTIIMHALGYCYDVRKKKWQAKNPACQIILFEDLSNYNPYEERSRFENSKLMKWSRREIPRQVALQGEIYGLQVGEVGAQFSSRFHAKTGSPGIRCSVVTKEKLQDNRFFKNLQREGRLTLDKIAVLKEGDLYPDKGGEKFISLSKDRKCVTTHADINAAQNLQKRFWTRTHGFYKVYCKAYQVDGQTVYIPESKDQKQKIIEEFGEGYFILKDGVYEWVNAGKGGSGGSSEVEFSHEYWMRHALTLAKRARDEREVPVGAVLVLNNRVIGEGWNRAIGLHDPTAHAEIMALRQGGLVMQNYRLYDATLYVTFEPCVMCAGAMIHSRIGRVVFGVRNAKTGAAGSLMDVLHHPGMNHRVEITEGILADECAALLCRFFRMPRRVFNAQKKAQSSTDGSSGSETPGTSESATPESSGLKIKKGSSKQSSSELVDSDILKDSFDLASELKGEKLMLYRDPSGNVFPSDKWMAAGVFFGKLERILISKLTNQYSISTIEDDSSKQSMKRPAATKKAGQAKKKKGSYPYDVPDYAYPYDVPDYAYPYDVPDYA

SEQ ID NO: 12 - protein, 208 aa, Petromyzon marinus
  REGION 1..208: note = MISC_FEATURE - tr|A5H718|A5H718_PETMA Cytosine deaminase OS=Petromyzon marinusOX=7757 PE=2 SV=1 amino acid sequence; PmCDA1 polypeptide sequence
MTDAEYVRIHEKLDIYTFKKQFFNNKKSVSHRCYVLFELKRRGERRACFWGYAVNKPQSGTERGIHAEIFSIRKVEEYLRDNPGQFTINWYSSWSPCADCAEKILEWYNQELRGNGHTLKIWACKLYYEKNARNQIGLWNLRDNGVGLNVMVSEHYQCCRKIFIQSSHNQLNENRWLEKTLKRAEKRRSELSIMIQVKILHTTKSPAV

SEQ ID NO: 13 - DNA, 766 bp, Petromyzon marinus
  misc_feature 1..766: note = EF094822.1 Petromyzon marinus isolate PmCDA.21 cytosine deaminase mRNA, complete cds; PmCDA1 polynucleotide sequence
  source 1..766: mol_type = genomic DNA
tgacacgacacagccgtgtatatgaggaagggtagctggatggggggggggggaatacgttcagagaggacattagcgagcgtcttgttggtggccttgagtctagacacctgcagacatgaccgacgctgagtacgtgagaatccatgagaagttggacatctacacgtttaagaaacagtttttcaacaacaaaaaatccgtgtcgcatagatgctacgttctctttgaattaaaacgacggggtgaacgtagagcgtgtttttggggctatgctgtgaataaaccacagagcgggacagaacgtggaattcacgccgaaatctttagcattagaaaagtcgaagaatacctgcgcgacaaccccggacaattcacgataaattggtactcatcctggagtccttgtgcagattgcgctgaaaagatcttagaatggtataaccaggagctgcgggggaacggccacactttgaaaatctgggcttgcaaactctattacgagaaaaatgcgaggaatcaaattgggctgtggaacctcagagataacggggttgggttgaatgtaatggtaagtgaacactaccaatgttgcaggaaaatattcatccaatcgtcgcacaatcaattgaatgagaatagatggcttgagaagactttgaagcgagctgaaaaacgacggagcgagttgtccattatgattcaggtaaaaatactccacaccactaagagtcctgctgtttaagaggctatgcggatggttttc

SEQ ID NO: 14 - protein, 145 aa, Homo sapiens
  REGION 1..145: note = MISC_FEATURE - tr|Q6QJ80|Q6QJ80_HUMAN Activation-induced cytidine deaminase OS=Homo sapiens; OX = 9606 GN=AICDA PE=2 SV=1; AID polypeptide sequence
MDSLLMNRRKFLYQFKNVRWAKGRRETYLCYVVKRRDSATSFSLDFGYLRNKNGCHVELLFLRYISDWDLDPGRCYRVTWFTSWSPCYDCARHVADFLRGNPNLSLRIFTARLYFCEDRKAEPEGLRRLHRAGVQIAIMTFKAPV

SEQ ID NO: 15 - DNA, 10681 bp, Homo sapiens
  misc_feature 1..10681: note = NG_011588.1:5001-15681 Homo sapiens activation induced cytidine deaminase (AICDA), RefSeqGene (LRG_17) on chromosome 12; nucleic acid sequence of the CDS of human AID; polynucleotide sequence
  source 1..10681: mol_type = genomic DNA
agagaaccatcattaattgaagtgagatttttctggcctgagacttgcagggaggcaagaagacactctggacaccactatggacaggtaaagaggcagtcttctcgtgggtgattgcactggccttcctctcagagcaaatctgagtaatgagactggtagctatccctttctctcatgtaactgtctgactgataagatcagcttgatcaatatgcatatatattttttgatctgtctccttttcttctattcagatcttatacgctgtcagcccaattctttctgtttcagacttctcttgatttccctctttttcatgtggcaaaagaagtagtgcgtacaatgtactgattcgtcctgagatttgtaccatggttgaaactaatttatggtaataatattaacatagcaaatctttagagactcaaatcatgaaaaggtaatagcagtactgtactaaaaacggtagtgctaattttcgtaataattttgtaaatattcaacagtaaaacaacttgaagacacactttcctagggaggcgttactgaaataatttagctatagtaagaaaatttgtaattttagaaatgccaagcattctaaattaattgcttgaaagtcactatgattgtgtccattataaggagacaaattcattcaagcaagttatttaatgttaaaggcccaattgttaggcagttaatggcacttttactattaactaatctttccatttgttcagacgtagcttaacttacctcttaggtgtgaatttggttaaggtcctcataatgtctttatgtgcagtttttgataggttattgtcatagaacttattctattcctacatttatgattactatggatgtatgagaataacacctaatccttatactttacctcaatttaactcctttataaagaacttacattacagaataaagattttttaaaaatatatttttttgtagagacagggtcttagcccagccgaggctggtctctaagtcctggcccaagcgatcctcctgcctgggcctcctaaagtgctggaattatagacatgagccatcacatccaatatacagaataaagatttttaatggaggatttaatgttcttcagaaaattttcttgaggtcagacaatgtcaaatgtctcctcagtttacactgagattttgaaaacaagtctgagctataggtccttgtgaagggtccattggaaatacttgttcaaagtaaaatggaaagcaaaggtaaaatcagcagttgaaattcagagaaagacagaaaaggagaaaagatgaaattcaacaggacagaagggaaatatattatcattaaggaggacagtatctgtagagctcattagtgatggcaaaatgacttggtcaggattatttttaacccgcttgtttctggtttgcacggctggggatgcagctagggttctgcctcagggagcacagctgtccagagcagctgtcagcctgcaagcctgaaacactccctcggtaaagtccttcctactcaggacagaaatgacgagaacagggagctggaaacaggcccctaaccagagaagggaagtaatggatcaacaaagttaactagcaggtcaggatcacgcaattcatttcactctgactggtaacatgtgacagaaacagtgtaggcttattgtattttcatgtagagtaggacccaaaaatccacccaaagtcctttatctatgccacatccttcttatctatacttccaggacactttttcttccttatgataaggctctctctctctccacacacacacacacacacacacacacacacacacacacacacacaaacacacaccccgccaaccaaggtgcatgtaaaaagatgtagattcctctgcctttctcatctacacagcccaggagggtaagttaatataagagggatttattggtaagagatgatgcttaatctgtttaacactgggcctcaaagagagaatttcttttcttctgtacttattaagcacctattatgtgttgagcttatatatacaaagggttattatatgctaatatagtaatagtaatggtggttggtactatggtaattaccataaaaattattatccttttaaaataaagctaattattattggatcttttttagtattcattttatgttttttatgtttttgattttttaaaagacaatctcaccctgttacccaggctggagtgcagtggtgcaatcatagctttctgcagtcttgaactcctgggctcaagcaatcctcctgccttggcctcccaaagtgttgggatacagtcatgagccactgcatctggcctaggatccatttagattaaaatatgcattttaaattttaaaataatatggctaatttttaccttatgtaatgtgtatactggcaataaatctagtttgctgcctaaagtttaaagtgctttccagtaagcttcatgtacgtgaggggagacatttaaagtgaaacagacagccaggtgtggtggctcacgcctgtaatcccagcactctgggaggctgaggtgggtggatcgcttgagccctggagttcaagaccagcctgagcaacatggcaaaacgctgtttctataacaaaaattagccgggcatggtggcatgtgcctgtggtcccagctactagggggctgaggcaggagaatcgttggagcccaggaggtcaaggctgcactgagcagtgcttgcgccactgcactccagcctgggtgacaggaccagaccttgcctcaaaaaaataagaagaaaaattaaaaataaatggaaacaactacaaagagctgttgtcctagatgagctacttagttaggctgatattttggtatttaacttttaaagtcagggtctgtcacctgcactacattattaaaatatcaattctcaatgtatatccacacaaagactggtacgtgaatgttcatagtacctttattcacaaaaccccaaagtagagactatccaaatatccatcaacaagtgaacaaataaacaaaatgtgctatatccatgcaatggaataccaccctgcagtacaaagaagctacttggggatgaatcccaaagtcatgacgctaaatgaaagagtcagacatgaaggaggagataatgtatgccatacgaaattctagaaaatgaaagtaacttatagttacagaaagcaaatcagggcaggcatagaggctcacacctgtaatcccagcactttgagaggccacgtgggaagattgctagaactcaggagttcaagaccagcctgggcaacacagtgaaactccattctccacaaaaatgggaaaaaaagaaagcaaatcagtggttgtcctgtggggaggggaaggactgcaaagagggaagaagctctggtggggtgagggtggtgattcaggttctgtatcctgactgtggtagcagtttggggtgtttacatccaaaaatattcgtagaattatgcatcttaaatgggtggagtttactgtatgtaaattatacctcaatgtaagaaaaaataatgtgtaagaaaactttcaattctcttgccagcaaacgttattcaaattcctgagccctttacttcgcaaattctctgcacttctgccccgtaccattaggtgacagcactagctccacaaattggataaatgcatttctggaaaagactagggacaaaatccaggcatcacttgtgctttcatatcaaccatgctgtacagcttgtgttgctgtctgcagctgcaatggggactcttgatttctttaaggaaacttgggttaccagagtatttccacaaatgctattcaaattagtgcttatgatatgcaagacactgtgctaggagccagaaaacaaagaggaggagaaatcagtcattatgtgggaacaacatagcaagatatttagatcattttgactagttaaaaaagcagcagagtacaaaatcacacatgcaatcagtataatccaaatcatgtaaatatgtgcctgtagaaagactagaggaataaacacaagaatcttaacagtcattgtcattagacactaagtctaattattattattagacactatgatatttgagatttaaaaaatctttaatattttaaaatttagagctcttctatttttccatagtattcaagtttgacaatgatcaagtattactctttctttttttttttttttttttttttttgagatggagttttggtcttgttgcccatgctggagtggaatggcatgaccatagctcactgcaacctccacctcctgggttcaagcaaagctgtcgcctcagcctcccgggtagatgggattacaggcgcccaccaccacactcggctaatgtttgtatttttagtagagatggggtttcaccatgttggccaggctggtctcaaactcctgacctcagaggatccacctgcctcagcctcccaaagtgctgggattacagatgtaggccactgcgcccggccaagtattgctcttatacattaaaaaacaggtgtgagccactgcgcccagccaggtattgctcttatacattaaaaaataggccggtgcagtggctcacgcctgtaatcccagcactttgggaagccaaggcgggcagaacacccgaggtcaggagtccaaggccagcctggccaagatggtgaaaccccgtctctattaaaaatacaaacattacctgggcatgatggtgggcgcctgtaatcccagctactcaggaggctgaggcaggaggatccgcggagcctggcagatctgcctgagcctgggaggttgaggctacagtaagccaagatcatgccagtatacttcagcctgggcgacaaagtgagaccgtaacaaaaaaaaaaaaatttaaaaaaagaaatttagatcaagatccaactgtaaaaagtggcctaaacaccacattaaagagtttggagtttattctgcaggcagaagagaaccatcagggggtcttcagcatgggaatggcatggtgcacctggtttttgtgagatcatggtggtgacagtgtggggaatgttattttggagggactggaggcagacagaccggttaaaaggccagcacaacagataaggaggaagaagatgagggcttggaccgaagcagagaagagcaaacagggaaggtacaaattcaagaaatattggggggtttgaatcaacacatttagatgattaattaaatatgaggactgaggaataagaaatgagtcaaggatggttccaggctgctaggctgcttacctgaggtggcaaagtcgggaggagtggcagtttaggacagggggcagttgaggaatattgttttgatcattttgagtttgaggtacaagttggacacttaggtaaagactggaggggaaatctgaatatacaattatgggactgaggaacaagtttattttattttttgtttcgttttcttgttgaagaacaaatttaattgtaatcccaagtcatcagcatctagaagacagtggcaggaggtgactgtcttgtgggtaagggtttggggtccttgatgagtatctctcaattggccttaaatataagcaggaaaaggagtttatgatggattccaggctcagcagggctcaggagggctcaggcagccagcagaggaagtcagagcatcttctttggtttagcccaagtaatgacttccttaaaaagctgaaggaaaatccagagtgaccagattataaactgtactcttgcattttctctccctcctctcacccacagcctcttgatgaaccggaggaagtttctttaccaattcaaaaatgtccgctgggctaagggtcggcgtgagacctacctgtgctacgtagtgaagaggcgtgacagtgctacatccttttcactggactttggttatcttcgcaataaggtatcaattaaagtcggctttgcaagcagtttaatggtcaactgtgagtgcttttagagccacctgctgatggtattacttccatccttttttggcatttgtgtctctatcacattcctcaaatccttttttttatttctttttccatgtccatgcacccatattagacatggcccaaaatatgtgatttaattcctccccagtaatgctgggcaccctaataccactccttccttcagtgccaagaacaactgctcccaaactgtttaccagctttcctcagcatctgaattgcctttgagattaattaagctaaaagcatttttatatgggagaatattatcagcttgtccaagcaaaaattttaaatgtgaaaaacaaattgtgtcttaagcatttttgaaaattaaggaagaagaatttgggaaaaaattaacggtggctcaattctgtcttccaaatgatttcttttccctcctactcacatgggtcgtaggccagtgaatacattcaacatggtgatccccagaaaactcagagaagcctcggctgatgattaattaaattgatctttcggctacccgagagaattacatttccaagagacttcttcaccaaaatccagatgggtttacataaacttctgcccacgggtatctcctctctcctaacacgctgtgacgtctgggcttggtggaatctcagggaagcatccgtggggtggaaggtcatcgtctggctcgttgtttgatggttatattaccatgcaattttctttgcctacatttgtattgaatacatcccaatctccttcctattcggtgacatgacacattctatttcagaaggctttgattttatcaagcactttcatttacttctcatggcagtgcctattacttctcttacaatacccatctgtctgctttaccaaaatctatttccccttttcagatcctcccaaatggtcctcataaactgtcctgcctccacctagtggtccaggtatatttccacaatgttacatcaacaggcacttctagccattttccttctcaaaaggtgcaaaaagcaacttcataaacacaaattaaatcttcggtgaggtagtgtgatgctgcttcctcccaactcagcgcacttcgtcttcctcattccacaaaaacccatagccttccttcactctgcaggactagtgctgccaagggttcagctctacctactggtgtgctcttttgagcaagttgcttagcctctctgtaacacaaggacaatagctgcaagcatccccaaagatcattgcaggagacaatgactaaggctaccagagccgcaataaaagtcagtgaattttagcgtggtcctctctgtctctccagaacggctgccacgtggaattgctcttcctccgctacatctcggactgggacctagaccctggccgctgctaccgcgtcacctggttcacctcctggagcccctgctacgactgtgcccgacatgtggccgactttctgcgagggaaccccaacctcagtctgaggatcttcaccgcgcgcctctacttctgtgaggaccgcaaggctgagcccgaggggctgcggcggctgcaccgcgccggggtgcaaatagccatcatgaccttcaaaggtgcgaaagggccttccgcgcaggcgcagtgcagcagcccgcattcgggattgcgatgcggaatgaatgagttagtggggaagctcgaggggaagaagtgggcggggattctggttcacctctggagccgaaattaaagattagaagcagagaaaagagtgaatggctcagagacaaggccccgaggaaatgagaaaatggggccagggttgcttctttcccctcgatttggaacctgaactgtcttctacccccatatccccgcctttttttcctttttttttttttgaagattatttttactgctggaatacttttgtagaaaaccacgaaagaactttcaaagcctgggaagggctgcatgaaaattcagttcgtctctccagacagcttcggcgcatccttttggtaaggggcttcctcgctttttaaattttctttctttctctacagtcttttttggagtttcgtatatttcttatattttcttattgttcaatcactctcagttttcatctgatgaaaactttatttctcctccacatcagctttttcttctgctgtttcaccattcagagccctctgctaaggttccttttccctcccttttctttcttttgttgtttcacatctttaaatttctgtctctccccagggttgcgtttccttcctggtcagaattcttttctcctttttttttttttttttttttttttttaaacaaacaaacaaaaaacccaaaaaaactctttcccaatttactttcttccaacatgttacaaagccatccactcagtttagaagactctccggccccaccgacccccaacctcgttttgaagccattcactcaatttgcttctctctttctctacagcccctgtatgaggttgatgacttacgagacgcatttcgtactttgggactttgatagcaacttccaggaatgtcacacacgatgaaatatctctgctgaagacagtggataaaaaacagtccttcaagtcttctctgtttttattcttcaactctcactttcttagagtttacagaaaaaatatttatatacgactctttaaaaagatctatgtcttgaaaatagagaaggaacacaggtctggccagggacgtgctgcaattggtgcagttttgaatgcaacattgtcccctactgggaataacagaactgcaggacctgggagcatcctaaagtgtcaacgtttttctatgacttttaggtaggatgagagcagaaggtagatcctaaaaagcatggtgagaggatcaaatgtttttatatcaacatcctttattatttgattcatttgagttaacagtggtgttagtgatagatttttctattcttttcccttgacgtttactttcaagtaacacaaactcttccatcaggccatgatctataggacctcctaatgagagtatctgggtgattgtgaccccaaaccatctctccaaagcattaatatccaatcatgcgctgtatgttttaatcagcagaagcatgtttttatgtttgtacaaaagaagattgttatgggtggggatggaggtatagaccatgcatggtcaccttcaagctactttaataaaggatcttaaaatgggcaggaggactgtgaacaagacaccctaataatgggttgatgtctgaagtagcaaatcttctggaaacgcaaactcttttaaggaagtccctaatttagaaacacccacaaacttcacatatcataattagcaaacaattggaaggaagttgcttgaatgttggggagaggaaaatctattggctctcgtgggtctcttcatctcagaaatgccaatcaggtcaaggtttgctacattttgtatgtgtgtgatgcttctcccaaaggtatattaactatataagagagttgtgacaaaacagaatgataaagctgcgaaccgtggcacacgctcatagttctagctgcttgggaggttgaggagggaggatggcttgaacacaggtgttcaaggccagcctgggcaacataacaagatcctgtctctcaaaaaaaaaaaaaaaaaaaagaaagagagagggccgggcgtggtggctcacgcctgtaatcccagcactttgggaggccgagccgggcggatcacctgtggtcaggagtttgagaccagcctggccaacatggcaaaaccccgtctgtactcaaaatgcaaaaattagccaggcgtggtagcaggcacctgtaatcccagctacttgggaggctgaggcaggagaatcgcttgaacccaggaggtggaggttgcagtaagctgagatcgtgccgttgcactccagcctgggcgacaagagcaagactctgtctcagaaaaaaaaaaaaaaaagagagagagagagaaagagaacaatatttgggagagaaggatggggaagcattgcaaggaaattgtgctttatccaacaaaatgtaaggagccaataagggatccctatttgtctcttttggtgtctatttgtccctaacaactgtctttgacagtgagaaaaatattcagaataaccatatccctgtgccgttattacctagcaacccttgcaatgaagatgagcagatccacaggaaaacttgaatgcacaactgtcttattttaatcttattgtacataagtttgtaaaagagttaaaaattgttacttcatgtattcatttatattttatattattttgcgtctaatgattttttattaacatgatttccttttctgatatattgaaatggagtctcaaagcttcataaatttataactttagaaatgattctaataacaacgtatgtaattgtaacattgcagtaatggtgctacgaagccatttctcttgatttttagtaaacttttatgacagcaaatttgcttctggctcactttcaatcagttaaataaatgataaataattttggaagctgtgaagataaaataccaaataaaataatataaaagtgatttatatgaagttaaaataaaaaatcagtatgatggaataaacttg

SEQ ID NO: 16 - protein, 198 aa, Homo sapiens [sequence omitted]

SEQ ID NO: 17 - protein, 198 aa, Canis lupus
  REGION 1..198: note = MISC_FEATURE - Canine AID (clAID) polypeptide sequence
  REGION 1..30: note = MISC_FEATURE - Nuclear localization sequence
  REGION 183..198: note = MISC_FEATURE - Nuclear export signal
MDSLLMKQRKFLYHFKNVRWAKGRHETYLCYVVKRRDSATSFSLDFGHLRNKSGCHVELLFLRYISDWDLDPGRCYRVTWFTSWSPCYDCARHVADFLRGYPNLSLRIFAARLYFCEDRKAEPEGLRRLHRAGVQIAIMTFKDYFYCWNTFVENREKTFKAWEGLHENSVRLSRQLRRILLPLYEVDDLRDAFRTLGL

SEQ ID NO: 18 - protein, 199 aa, Bos taurus
  REGION 1..199: note = MISC_FEATURE - Bovine AID (btAID) polypeptide sequence
  REGION 1..30: note = MISC_FEATURE - Nuclear localization sequence
  REGION 183..199: note = MISC_FEATURE - Nuclear export signal
MDSLLKKQRQFLYQFKNVRWAKGRHETYLCYVVKRRDSPTSFSLDFGHLRNKAGCHVELLFLRYISDWDLDPGRCYRVTWFTSWSPCYDCARHVADFLRGYPNLSLRIFTARLYFCDKERKAEPEGLRRLHRAGVQIAIMTFKDYFYCWNTFVENHERTFKAWEGLHENSVRLSRQLRRILLPLYEVDDLRDAFRTLGL

SEQ ID NO: 19 - protein, 239 aa, Rattus sp.
  REGION 1..239: note = MISC_FEATURE - Rat AID polypeptide sequence
  REGION 1..26: note = MISC_FEATURE - Nuclear localization sequence
  REGION 194..239: note = MISC_FEATURE - Nuclear export signal
MAVGSKPKAALVGPHWERERIWCFLCSTGLGTQQTGQTSRWLRPAATQDPVSPPRSLLMKQRKFLYHFKNVRWAKGRHETYLCYVVKRRDSATSFSLDFGYLRNKSGCHVELLFLRYISDWDLDPGRCYRVTWFTSWSPCYDCARHVADFLRGNPNLSLRIFTARLTGWGALPAGLMSPARPSDYFYCWNTFVENHERTFKAWEGLHENSVRLSRRLRRILLPLYEVDDLRDAFRTLGL

SEQ ID NO: 20 - protein, 198 aa, Mus musculus [sequence omitted]

SEQ ID NO: 21 - protein, 229 aa, Rattus norvegicus [sequence omitted]

SEQ ID NO: 22 - protein, 229 aa, Mesocricetus auratus
  REGION 1..229: note = MISC_FEATURE - maAPOBEC-1 polypeptide sequence
MSSETGPVVVDPTLRRRIEPHEFDAFFDQGELRKETCLLYEIRWGGRHNIWRHTGQNTSRHVEINFIEKFTSERYFYPSTRCSIVWFLSWSPCGECSKAITEFLSGHPNVTLFIYAARLYHHTDQRNRQGLRDLISRGVTIRIMTEQEYCYCWRNFVNYPPSNEVYWPRYPNLWMRLYALELYCIHLGLPPCLKIKRRHQYPLTFFRLNLQSCHYQRIPPHILWATGFI

SEQ ID NO: 23 - protein, 236 aa, Pongo pygmaeus
  REGION 1..236: note = MISC_FEATURE - ppAPOBEC-1 polypeptide sequence
MTSEKGPSTGDPTLRRRIESWEFDVFYDPRELRKETCLLYEIKWGMSRKIWRSSGKNTTNHVEVNFIKKFTSERRFHSSISCSITWFLSWSPCWECSQAIREFLSQHPGVTLVIYVARLFWHMDQRNRQGLRDLVNSGVTIQIMRASEYYHCWRNFVNYPPGDEAHWPQYPPLWMMLYALELHCIILSLPPCLKISRRWQNHLAFFRLHLQNCHYQTIPPHILLATGLIHPSVTWR

SEQ ID NO: 24 - protein, 236 aa, Oryctolagus cuniculus
  REGION 1..236: note = MISC_FEATURE - ocAPOBEC1 polypeptide sequence
MASEKGPSNKDYTLRRRIEPWEFEVFFDPQELRKEACLLYEIKWGASSKTWRSSGKNTTNHVEVNFLEKLTSEGRLGPSTCCSITWFLSWSPCWECSMAIREFLSQHPGVTLIIFVARLFQHMDRRNRQGLKDLVTSGVTVRVMSVSEYCYCWENFVNYPPGKAAQWPRYPPRWMLMYALELYCIILGLPPCLKISRRHQKQLTFFSLTPQYCHYKMIPPYILLATGLLQPSVPWR

SEQ ID NO: 25 - protein, 235 aa, Monodelphis domestica
  REGION 1..235: note = MISC_FEATURE - mdAPOBEC-1 polypeptide sequence
MNSKTGPSVGDATLRRRIKPWEFVAFFNPQELRKETCLLYEIKWGNQNIWRHSNQNTSQHAEINFMEKFTAERHFNSSVRCSITWFLSWSPCWECSKAIRKFLDHYPNVTLAIFISRLYWHMDQQHRQGLKELVHSGVTIQIMSYSEYHYCWRNFVDYPQGEEDYWPKYPYLWIMLYVLELHCIILGLPPCLKISGSHSNQLALFSLDLQDCHYQKIPYNVLVATGLVQPFVTWR

SEQ ID NO: 26 - protein, 224 aa, Pongo pygmaeus
  REGION 1..224: note = MISC_FEATURE - ppAPOBEC-2 polypeptide sequence
MAQKEEAAAATEAASQNGEDLENLDDPEKLKELIELPPFEIVTGERLPANFFKFQFRNVEYSSGRNKTFLCYVVEAQGKGGQVQASRGYLEDEHAAAHAEEAFFNTILPAFDPALRYNVTWYVSSSPCAACADRIIKTLSKTKNLRLLILVGRLFMWEELEIQDALKKLKEAGCKLRIMKPQDFEYVWQNFVEQEEGESKAFQPWEDIQENFLYYEEKLADILK

SEQ ID NO: 27 - protein, 224 aa, Bos taurus
  REGION 1..224: note = MISC_FEATURE - btAPOBEC-2 polypeptide sequence
MAQKEEAAAAAEPASQNGEEVENLEDPEKLKELIELPPFEIVTGERLPAHYFKFQFRNVEYSSGRNKTFLCYVVEAQSKGGQVQASRGYLEDEHATNHAEEAFFNSIMPTFDPALRYMVTWYVSSSPCAACADRIVKTLNKTKNLRLLILVGRLFMWEEPEIQAALRKLKEAGCRLRIMKPQDFEYIWQNFVEQEEGESKAFEPWEDIQENFLYYEEKLADILK

SEQ ID NO: 28 - protein, 440 aa, Mus musculus
  REGION 1..440: note = MISC_FEATURE - mAPOBEC-3-(1) polypeptide sequence
MQPQRLGPRAGMGPFCLGCSHRKCYSPIRNLISQETFKFHFKNLGYAKGRKDTFLCYEVTRKDCDSPVSLHHGVFKNKDNIHAEICFLYWFHDKVLKVLSPREEFKITWYMSWSPCFECAEQIVRFLATHHNLSLDIFSSRLYNVQDPETQQNLCRLVQEGAQVAAMDLYEFKKCWKKFVDNGGRRFRPWKRLLTNFRYQDSKLQEILRPCYISVPSSSSSTLSNICLTKGLPETRFWVEGRRMDPLSEEEFYSQFYNQRVKHLCYYHRMKPYLCYQLEQFNGQAPLKGCLLSEKGKQHAEILFLDKIRSMELSQVTITCYLTWSPCPNCAWQLAAFKRDRPDLILHIYTSRLYFHWKRPFQKGLCSLWQSGILVDVMDLPQFTDCWTNFVNPKRPFWPWKGLEIISRRTQRRLRRIKESWGLQDLVNDFGNLQLGPPMS

SEQ ID NO: 29 - protein, 429 aa, Mus musculus
  REGION 1..429: note = MISC_FEATURE - APOBEC-3-(2) (Mouse APOBEC-3) polypeptide sequence
  REGION 71..108: note = MISC_FEATURE - Nucleic acid editing domain
  REGION 288..319: note = MISC_FEATURE - Nucleic acid editing domain
MGPFCLGCSHRKCYSPIRNLISQETFKFHFKNLGYAKGRKDTFLCYEVTRKDCDSPVSLHHGVFKNKDNIHAEICFLYWFHDKVLKVLSPREEFKITWYMSWSPCFECAEQIVRFLATHHNLSLDIFSSRLYNVQDPETQQNLCRLVQEGAQVAAMDLYEFKKCWKKFVDNGGRRFRPWKRLLTNFRYQDSKLQEILRPCYIPVPSSSSSTLSNICLTKGLPETRFCVEGRRMDPLSEEEFYSQFYNQRVKHLCYYHRMKPYLCYQLEQFNGQAPLKGCLLSEKGKQHAEILFLDKIRSMELSQVTITCYLTWSPCPNCAWQLAAFKRDRPDLILHIYTSRLYFHWKRPFQKGLCSLWQSGILVDVMDLPQFTDCWTNFVNPKRPFWPWKGLEIISRRTQRRLRRIKESWGLQDLVNDFGNLQLGPPMS

SEQ ID NO: 30 - protein, 430 aa, Rattus sp.
  REGION 1..430: note = MISC_FEATURE - APOBEC-3 polypeptide sequence
  REGION 72..109: note = MISC_FEATURE - Nucleic acid editing domain
  REGION 289..320: note = MISC_FEATURE - Nucleic acid editing domain
MGPFCLGCSHRKCYSPIRNLISQETFKFHFKNRLRYAIDRKDTFLCYEVTRKDCDSPVSLHHGVFKNKDNIHAEICFLYWFHDKVLKVLSPREEFKITWYMSWSPCFECAEQVLRFLATHHNLSLDIFSSRLYNIRDPENQQNLCRLVQEGAQVAAMDLYEFKKCWKKFVDNGGRRFRPWKKLLTNFRYQDSKLQEILRPCYIPVPSSSSSTLSNICLTKGLPETRFCVERRRVHLLSEEEFYSQFYNQRVKHLCYYHGVKPYLCYQLEQFNGQAPLKGCLLSEKGKQHAEILFLDKIRSMELSQVIITCYLTWSPCPNCAWQLAAFKRDRPDLILHIYTSRLYFHWKRPFQKGLCSLWQSGILVDVMDLPQFTDCWTNFVNPKRPFWPWKGLEIISRRTQRRLHRIKESWGLQDLVNDFGNLQLGPPMS

SEQ ID NO: 31 - protein, 199 aa, Homo sapiens
  REGION 1..199: note = MISC_FEATURE - hAPOBEC-3A polypeptide sequence
  REGION 70..106: note = MISC_FEATURE - Nucleic acid editing domain
MEASPASGPRHLMDPHIFTSNFNNGIGRHKTYLCYEVERLDNGTSVKMDQHRGFLHNQAKNLLCGFYGRHAELRFLDLVPSLQLDPAQIYRVTWFISWSPCFSWGCAGEVRAFLQENTHVRLRIFAARIYDYDPLYKEALQMLRDAGAQVSIMTYDEFKHCWDTFVDHQGCPFQPWDGLDEHSQALSGRLRAILQNQGN

SEQ ID NO: 32 - protein, 373 aa, Homo sapiens
  REGION 1..373: note = MISC_FEATURE - hAPOBEC-3F polypeptide sequence
  REGION 65..99: note = MISC_FEATURE - Nucleic acid editing domain
  REGION 248..283: note = MISC_FEATURE - Nucleic acid editing domain
MKPHFRNTVERMYRDTFSYNFYNRPILSRRNTVWLCYEVKTKGPSRPRLDAKIFRGQVYSQPEHHAEMCFLSWFCGNQLPAYKCFQITWFVSWTPCPDCVAKLAEFLAEHPNVTLTISAARLYYYWERDYRRALCRLSQAGARVKIMDDEEFAYCWENFVYSEGQPFMPWYKFDDNYAFLHRTLKEILRNPMEAMYPHIFYFHFKNLRKAYGRNESWLCFTMEVVKHHSPVSWKRGVFRNQVDPETHCHAERCFLSWFCDDILSPNTNYEVTWYTSWSPCPECAGEVAEFLARHSNVNLTIFTARLYYFWDTDYQEGLRSLSQEGASVEIMGYKDFKYCWENFVYNDDEPFKPWKGLKYNFLFLDSKLQEILE

SEQ ID NO: 33 - protein, 370 aa, Macaca mulatta
  REGION 1..370: note = MISC_FEATURE - Rhesus macaque APOBEC-3G polypeptide sequence
  REGION 1..61: note = MISC_FEATURE - Cytoplasmic localization signal
MVEPMDPRTFVSNFNNRPILSGLNTVWLCCEVKTKDPSGPPLDAKIFQGKVYSKAKYHPEMRFLRWFHKWRQLHHDQEYKVTWYVSWSPCTRCANSVATFLAKDPKVTLTIFVARLYYFWKPDYQQALRILCQKRGGPHATMKIMNYNEFQDCWNKFVDGRGKPFKPRNNLPKHYTLLQATLGELLRHLMDPGTFTSNFNNKPWVSGQHETYLCYKVERLHNDTWVPLNQHRGFLRNQAPNIHGFPKGRHAELCFLDLIPFWKLDGQQYRVTCFTSWSPCFSCAQEMAKFISNNEHVSLCIFAARIYDDQGRYQEGLRALHRDGAKIAMMNYSEFEYCWDTFVDRQGRPFQPWDGLDEHSQALSGRLRAI

SEQ ID NO: 34 - protein, 384 aa, Pan troglodytes
  REGION 1..384: note = MISC_FEATURE - Chimpanzee APOBEC-3G polypeptide sequence
  REGION 1..60: note = MISC_FEATURE - Cytoplasmic localization signal
  REGION 65..100: note = MISC_FEATURE - Nucleic acid editing domain
  REGION 257..291: note = MISC_FEATURE - Nucleic acid editing domain
MKPHFRNPVERMYQDTFSDNFYNRPILSHRNTVWLCYEVKTKGPSRPPLDAKIFRGQVYSKLKYHPEMRFFHWFSKWRKLHRDQEYEVTWYISWSPCTKCTRDVATFLAEDPKVTLTIFVARLYYFWDPDYQEALRSLCQKRDGPRATMKIMNYDEFQHCWSKFVYSQRELFEPWNNLPKYYILLHIMLGEILRHSMDPPTFTSNFNNELWVRGRHETYLCYEVERLHNDTWVLLNQRRGFLCNQAPHKHGFLEGRHAELCFLDVIPFWKLDLHQDYRVTCFTSWSPCFSCAQEMAKFISNNKHVSLCIFAARIYDDQGRCQEGLRTLAKAGAKISIMTYSEFKHCWDTFVDHQGCPFQPWDGLEEHSQALSGRLRAILQNQGN

SEQ ID NO: 35 - protein, 377 aa, Chlorocebus sabaeus
  REGION 1..377: note = MISC_FEATURE - Green monkey APOBEC-3G polypeptide sequence
  REGION 1..60: note = MISC_FEATURE - Cytoplasmic localization signal
  REGION 65..100: note = MISC_FEATURE - Nucleic acid editing domain
  REGION 257..290: note = MISC_FEATURE - Nucleic acid editing domain
MNPQIRNMVEQMEPDIFVYYFNNRPILSGRNTVWLCYEVKTKDPSGPPLDANIFQGKLYPEAKDHPEMKFLHWFRKWRQLHRDQEYEVTWYVSWSPCTRCANSVATFLAEDPKVTLTIFVARLYYFWKPDYQQALRILCQERGGPHATMKIMNYNEFQHCWNEFVDGQGKPFKPRKNLPKHYTLLHATLGELLRHVMDPGTFTSNFNNKPWVSGQRETYLCYKVERSHNDTWVLLNQHRGFLRNQAPDRHGFPKGRHAELCFLDLIPFWKLDDQQYRVTCFTSWSPCFSCAQKMAKFISNNKHVSLCIFAARIYDDQGRCQEGLRTLHRDGAKIAVMNYSEFEYCWDTFVDRQGRPFQPWDGLDEHSQALSGRLRAI

SEQ ID NO: 36 - protein, 384 aa, Homo sapiens
  REGION 1..384: note = MISC_FEATURE - Human APOBEC-3G polypeptide sequence
  REGION 1..60: note = MISC_FEATURE - Cytoplasmic localization signal
  REGION 65..100: note = MISC_FEATURE - Nucleic acid editing domain
  REGION 257..291: note = MISC_FEATURE - Nucleic acid editing domain
MKPHFRNTVERMYRDTFSYNFYNRPILSRRNTVWLCYEVKTKGPSRPPLDAKIFRGQVYSELKYHPEMRFFHWFSKWRKLHRDQEYEVTWYISWSPCTKCTRDMATFLAEDPKVTLTIFVARLYYFWDPDYQEALRSLCQKRDGPRATMKIMNYDEFQHCWSKFVYSQRELFEPWNNLPKYYILLHIMLGEILRHSMDPPTFTFNFNNEPWVRGRHETYLCYEVERMHNDTWVLLNQRRGFLCNQAPHKHGFLEGRHAELCFLDVIPFWKLDLDQDYRVTCFTSWSPCFSCAQEMAKFISKNKHVSLCIFTARIYDDQGRCQEGLRTLAEAGAKISIMTYSEFKHCWDTFVDHQGCPFQPWDGLDEHSQDLSGRLRAILQNQEN

SEQ ID NO: 37 - protein, 382 aa, Homo sapiens
  REGION 1..382: note = MISC_FEATURE - Human APOBEC-3B polypeptide sequence
  REGION 66..100: note = MISC_FEATURE - Nucleic acid editing domain
  REGION 251..289: note = MISC_FEATURE - Nucleic acid editing domain
MNPQIRNPMERMYRDTFYDNFENEPILYGRSYTWLCYEVKIKRGRSNLLWDTGVFRGQVYFKPQYHAEMCFLSWFCGNQLPAYKCFQITWFVSWTPCPDCVAKLAEFLSEHPNVTLTISAARLYYYWERDYRRALCRLSQAGARVTIMDYEEFAYCWENFVYNEGQQFMPWYKFDENYAFLHRTLKEILRYLMDPDTFTFNFNNDPLVLRRRQTYLCYEVERLDNGTWVLMDQHMGFLCNEAKNLLCGFYGRHAELRFLDLVPSLQLDPAQIYRVTWFISWSPCFSWGCAGEVRAFLQENTHVRLRIFAARIYDYDPLYKEALQMLRDAGAQVSIMTYDEFEYCWDTFVYRQGCPFQPWDGLEEHSQALSGRLRAILQNQGN

SEQ ID NO: 38 - protein, 395 aa, Rattus sp.
  REGION 1..395: note = MISC_FEATURE - Rat APOBEC-3B polypeptide sequence
MQPQGLGPNAGMGPVCLGCSHRRPYSPIRNPLKKLYQQTFYFHFKNVRYAWGRKNNFLCYEVNGMDCALPVPLRQGVFRKQGHIHAELCFIYWFHDKVLRVLSPMEEFKVTWYMSWSPCSKCAEQVARFLAAHRNLSLAIFSSRLYYYLRNPNYQQKLCRLIQEGVHVAAMDLPEFKKCWNKFVDNDGQPFRPWMRLRINFSFYDCKLQEIFSRMNLLREDVFYLQFNNSHRVKPVQNRYYRRKSYLCYQLERANGQEPLKGYLLYKKGEQHVEILFLEKMRSMELSQVRITCYLTWSPCPNCARQLAAFKKDHPDLILRIYTSRLYFWRKKFQKGLCTLWRSGIHVDVMDLPQFADCWTNFVNPQRPFRPWNELEKNSWRIQRRLRRIKESWGL

SEQ ID NO: 39 - protein, 226 aa, Bos taurus
  REGION 1..226: note = MISC_FEATURE - Bovine APOBEC-3B polypeptide sequence
DGWEVAFRSGTVLKAGVLGVSMTEGWAGSGHPGQGACVWTPGTRNTMNLLREVLFKQQFGNQPRVPAPYYRRKTYLCYQLKQRNDLTLDRGCFRNKKQRHAERFIDKINSLDLNPSQSYKIICYITWSPCPNCANELVNFITRNNHLKLEIFASRLYFHWIKSFKMGLQDLQNAGISVAVMTHTEFEDCWEQFVDNQSRPFQPWDKLEQYSASIRRRLQRILTAPI

SEQ ID NO: 40 - protein, 490 aa, Pan troglodytes
  REGION 1..490: note = MISC_FEATURE - Chimpanzee APOBEC-3B polypeptide sequence
MNPQIRNPMEWMYQRTFYYNFENEPILYGRSYTWLCYEVKIRRGHSNLLWDTGVFRGQMYSQPEHHAEMCFLSWFCGNQLSAYKCFQITWFVSWTPCPDCVAKLAKFLAEHPNVTLTISAARLYYYWERDYRRALCRLSQAGARVKIMDDEEFAYCWENFVYNEGQPFMPWYKFDDNYAFLHRTLKEIIRHLMDPDTFTFNFNNDPLVLRRHQTYLCYEVERLDNGTWVLMDQHMGFLCNEAKNLLCGFYGRHAELRFLDLVPSLQLDPAQIYRVTWFISWSPCFSWGCAGQVRAFLQENTHVRLRIFAARIYDYDPLYKEALQMLRDAGAQVSIMTYDEFEYCWDTFVYRQGCPFQPWDGLEEHSQALSGRLRAILQVRASSLCMVPHRPPPPPQSPGPCLPLCSEPPLGSLLPTGRPAPSLPFLLTASFSFPPPASLPPLPSLSLSPGHLPVPSFHSLTSCSIQPPCSSRIRETEGWASVSKEGRDLG

SEQ ID NO: 41 - protein, 190 aa, Homo sapiens
  REGION 1..190: note = MISC_FEATURE - Human APOBEC-3C polypeptide sequence
  REGION 65..100: note = MISC_FEATURE - Nucleic acid editing domain
MNPQIRNPMKAMYPGTFYFQFKNLWEANDRNETWLCFTVEGIKRRSVVSWKTGVFRNQVDSETHCHAERCFLSWFCDDILSPNTKYQVTWYTSWSPCPDCAGEVAEFLARHSNVNLTIFTARLYYFQYPCYQEGLRSLSQEGVAVEIMDYEDFKYCWENFVYNDNEPFKPWKGLKTNFRLLKRRLRESLQ

SEQ ID NO: 42 - protein, 190 aa, Gorilla sp.
  REGION 1..190: note = MISC_FEATURE - Gorilla APOBEC-3C polypeptide sequence
  REGION 65..100: note = MISC_FEATURE - Nucleic acid editing domain
MNPQIRNPMKAMYPGTFYFQFKNLWEANDRNETWLCFTVEGIKRRSVVSWKTGVFRNQVDSETHCHAERCFLSWECDDILSPNTNYQVTWYTSWSPCPECAGEVAEFLARHSNVNLTIFTARLYYFQDTDYQEGLRSLSQEGVAVKIMDYKDFKYCWENFVYNDDEPFKPWKGLKYNFRFLKRRLQEILE

SEQ ID NO: 43 - protein, 202 aa, Macaca mulatta
  REGION 1..202: note = MISC_FEATURE - Rhesus macaque APOBEC-3A polypeptide sequence
  REGION 72..103: note = MISC_FEATURE - Nucleic acid editing domain
MDGSPASRPRHLMDPNTFTFNFNNDLSVRGRHQTYLCYEVERLDNGTWVPMDERRGFLCNKAKNVPCGDYGCHVELRFLCEVPSWQLDPAQTYRVTWFISWSPCFRRGCAGQVRVFLQENKHVRLRIFAARIYDYDPLYQEALRTLRDAGAQVSIMTYEEFKHCWDTFVDRQGRPFQPWDGLDEHSQALSGRLRAILQNQGN

SEQ ID NO: 44 - protein, 185 aa, Bos taurus
  REGION 1..185: note = MISC_FEATURE - Bovine APOBEC-3A polypeptide sequence
  REGION 56..86: note = MISC_FEATURE - Nucleic acid editing domain
MDEYTFTENFNNQGWPSKTYLCYEMERLDGDATIPLDEYKGFVRNKGLDQPEKPCHAELYFLGKIHSWNLDRNQHYRLTCFISWSPCYDCAQKLTTFLKENHHISLHILASRIYTHNRFGCHQSGLCELQAAGARITIMTFEDFKHCWETFVDHKGKPFQPWEGLNVKSQALCTELQAILKTQQN

SEQ ID NO: 45 - protein, 200 aa, Homo sapiens
  REGION 1..200: note = MISC_FEATURE - Human APOBEC-3H polypeptide sequence
  REGION 54..88: note = MISC_FEATURE - Nucleic acid editing domain
MALLTAETFRLQFNNKRRLRRPYYPRKALLCYQLTPQNGSTPTRGYFENKKKCHAEICFINEIKSMGLDETQCYQVTCYLTWSPCSSCAWELVDFIKAHDHLNLGIFASRLYYHWCKPQQKGLRLLCGSQVPVEVMGFPKFADCWENFVDHEKPLSFNPYKMLEELDKNSRAIKRRLERIKIPGVRAQGRYMDILCDAEV

SEQ ID NO: 46 - protein, 210 aa, Macaca mulatta
  REGION 1..210: note = MISC_FEATURE - Rhesus macaque APOBEC-3H polypeptide sequence
MALLTAKTFSLQFNNKRRVNKPYYPRKALLCYQLTPQNGSTPTRGHLKNKKKDHAEIRFINKIKSMGLDETQCYQVTCYLTWSPCPSCAGELVDFIKAHRHLNLRIFASRLYYHWRPNYQEGLLLLCGSQVPVEVMGLPEFTDCWENFVDHKEPPSFNPSEKLEELDKNSQAIKRRLERIKSRSVDVLENGLRSLQLGPVTPSSSIRNSR

SEQ ID NO: 47 - protein, 386 aa, Homo sapiens
  REGION 1..386: note = MISC_FEATURE - Human APOBEC-3D polypeptide sequence
  REGION 78..109: note = MISC_FEATURE - Nucleic acid editing domain
  REGION 262..296: note = MISC_FEATURE - Nucleic acid editing domain
MNPQIRNPMERMYRDTFYDNFENEPILYGRSYTWLCYEVKIKRGRSNLLWDTGVFRGPVLPKRQSNHRQEVYFRFENHAEMCFLSWFCGNRLPANRRFQITWFVSWNPCLPCVVKVTKFLAEHPNVTLTISAARLYYYRDRDWRWVLLRLHKAGARVKIMDYEDFAYCWENFVCNEGQPFMPWYKFDDNYASLHRTLKEILRNPMEAMYPHIFYFHFKNLLKACGRNESWLCFTMEVTKHHSAVFRKRGVFRNQVDPETHCHAERCFLSWFCDDILSPNTNYEVTWYTSWSPCPECAGEVAEFLARHSNVNLTIFTARLCYFWDTDYQEGLCSLSQEGASVKIMGYKDFVSCWKNFVYSDDEPFKPWKGLQTNFRLLKRRLREILQ

SEQ ID NO: 48 - protein, 236 aa, Homo sapiens
  REGION 1..236: note = MISC_FEATURE - Human APOBEC-1 polypeptide sequence
MTSEKGPSTGDPTLRRRIEPWEFDVFYDPRELRKEACLLYEIKWGMSRKIWRSSGKNTTNHVEVNFIKKFTSERDFHPSMSCSITWFLSWSPCWECSQAIREFLSRHPGVTLVIYVARLFWHMDQQNRQGLRDLVNSGVTIQIMRASEYYHCWRNFVNYPPGDEAHWPQYPPLWMMLYALELHCIILSLPPCLKISRRWQNHLTFFRLHLQNCHYQTIPPHILLATGLIHPSVAWR

SEQ ID NO: 49 - protein, 229 aa, Mus musculus
  REGION 1..229: note = MISC_FEATURE - Mouse APOBEC-1 polypeptide sequence
MSSETGPVAVDPTLRRRIEPHEFEVFFDPRELRKETCLLYEINWGGRHSVWRHTSQNTSNHVEVNFLEKFTTERYFRPNTRCSITWFLSWSPCGECSRAITEFLSRHPYVTLFIYIARLYHHTDQRNRQGLRDLISSGVTIQIMTEQEYCYCWRNFVNYPPSNEAYWPRYPHLWVKLYVLELYCIILGLPPCLKILRRKQPQLTFFTITLQTCHYQRIPPHLLWATGLK

SEQ ID NO: 50 - protein, 224 aa, Homo sapiens
  REGION 1..224: note = MISC_FEATURE - Human APOBEC-2 polypeptide sequence
MAQKEEAAVATEAASQNGEDLENLDDPEKLKELIELPPFEIVTGERLPANFFKFQFRNVEYSSGRNKTFLCYVVEAQGKGGQVQASRGYLEDEHAAAHAEEAFFNTILPAFDPALRYNVTWYVSSSPCAACADRIIKTLSKTKNLRLLILVGRLFMWEEPEIQAALKKLKEAGCKLRIMKPQDFEYVWQNFVEQEEGESKAFQPWEDIQENFLYYEEKLADILK

SEQ ID NO: 51 - protein, 224 aa, Mus musculus
  REGION 1..224: note = MISC_FEATURE - Mouse APOBEC-2 polypeptide sequence
MAQKEEAAEAAAPASQNGDDLENLEDPEKLKELIDLPPFEIVTGVRLPVNFFKFQFRNVEYSSGRNKTFLCYVVEVQSKGGQAQATQGYLEDEHAGAHAEEAFFNTILPAFDPALKYNVTWYVSSSPCAACADRILKTLSKTKNLRLLILVSRLFMWEEPEVQAALKKLKEAGCKLRIMKPQDFEYIWQNFVEQEEGESKAFEPWEDIQENFLYYEEKLADILK

SEQ ID NO: 52 - protein, 224 aa, Rattus sp.
  REGION 1..224: note = MISC_FEATURE - Rat APOBEC-2 polypeptide sequence
MAQKEEAAEAAAPASQNGDDLENLEDPEKLKELIDLPPFEIVTGVRLPVNFFKFQFRNVEYSSGRNKTFLCYVVEAQSKGGQVQATQGYLEDEHAGAHAEEAFFNTILPAFDPALKYNVTWYVSSSPCAACADRILKTLSKTKNLRLLILVSRLFMWEEPEVQAALKKLKEAGCKLRIMKPQDFEYLWQNFVEQEEGESKAFEPWEDIQENFLYYEEKLADILK

SEQ ID NO: 53 - protein, 208 aa, Petromyzon marinus
  REGION 1..208: note = MISC_FEATURE - Petromyzon marinus CDA1 (pmCDAl) polypeptide sequence
MTDAEYVRIHEKLDIYTFKKQFFNNKKSVSHRCYVLFELKRRGERRACFWGYAVNKPQSGTERGIHAEIFSIRKVEEYLRDNPGQFTINWYSSWSPCADCAEKILEWYNQELRGNGHTLKIWACKLYYEKNARNQIGLWNLRDNGVGLNVMVSEHYQCCRKIFIQSSHNQLNENRWLEKTLKRAEKRRSELSFMIQVKILHTTKSPAV

SEQ ID NO: 54 - protein, 381 aa, Homo sapiens
  REGION 1..381: note = MISC_FEATURE - Human APOBEC3G D316R D317R polypeptide sequence
MKPHFRNTVERMYRDTFSYNFYNRPILSRRNTVWLCYEVKTKGPSRPPLDAKIFRGQVYSELKYHPEMRFFHWFSKWRKLHRDQEYEVTWYISWSPCTKCTRDMATFLAEDPKVTLTIFVARLYYFWDPDYQEALRSLCQKRDGPRATMKFNYDEFQHCWSKFVYSQRELFEPWNNLPKYYILLHFMLGEILRHSMDPPTFTFNFNNEPWVRGRHETYLCYEVERMHNDTWVLLNQRRGFLCNQAPHKHGFLEGRHAELCFLDVIPFWKLDLDQDYRVTCFTSWSPCFSCAQEMAKFISKKHVSLCIFTARIYRRQGRCQEGLRTLAEAGAKISFTYSEFKHCWDTFVDHQGCPFQPWDGLDEHSQDLSGRLRAILQNQEN

SEQ ID NO: 55 - protein, 182 aa, Homo sapiens
  REGION 1..182: note = MISC_FEATURE - Human APOBEC3G chain A polypeptide sequence
MDPPTFTFNFNNEPWWGRHETYLCYEVERMHNDTWVLLNQRRGFLCNQAPHKHGFLEGRHAELCFLDVIPFWKLDLDQDYRVTCFTSWSPCFSCAQEMAKFISKNKHVSLCIFTARIYDDQGRCQEGLRTLAEAGAKISFTYSEFKHCWDTFVDHQGCPFQPWDGLDEHSQDLSGRLRAILQ

SEQ ID NO: 56 - protein, 184 aa, Homo sapiens
  REGION 1..184: note = MISC_FEATURE - Human APOBEC3G chain A D120R D121R polypeptide sequence
MDPPTFTFNFNNEPWVRGRHETYLCYEVERMHNDTWVLLNQRRGFLCNQAPHKHGFLEGRHAELCFLDVIPFWKLDLDQDYRVTCFTSWSPCFSCAQEMAKFISKNKHVSLCIFTARIYRRQGRCQEGLRTLAEAGAKISFMTYSEFKHCWDTFVDHQGCPFQPWDGLDEHSQDLSGRLRAILQ

SEQ ID NO: 57 - protein, 367 aa, Homo sapiens
  REGION 1..367: note = MISC_FEATURE - hAPOBEC-4 polypeptide sequence
MEPIYEEYLANHGTIVKPYYWLSFSLDCSNCPYHIRTGEEARVSLTEFCQIFGFPYGTTFPQTKHLTFYELKTSSGSLVQKGHASSCTGNYIHPESMLFEMNGYLDSAIYNNDSIRHIILYSNNSPCNEANHCCISKMYNFLITYPGITLSIYFSQLYHTEMDFPASAWNREALRSLASLWPRVVLSPISGGIWHSVLHSFISGVSGSHVFQPILTGRALADRHNAYEINAITGVKPYFTDVLLQTKRNPNTKAQEALESYPLNNAFPGQFFQMPSGQLQPNLPPDLRAPVVFVLVPLRDLPPMHMGQNPNKPRNIVRHLNMPQMSFQETKDLGRLPTGRSVEIVEITEQFASSKEADEKKKKKGKK

SEQ ID NO: 58 - protein, 388 aa, Rattus norvegicus
  REGION 1..388: note = MISC_FEATURE - rAPOBEC-4 polypeptide sequence
MEPLYEEYLTHSGTIVKPYYWLSVSLNCTNCPYHIRTGEEARVPYTEFHQTFGFPWSTYPQTKHLTFYELRSSSGNLIQKGLASNCTGSHTHPESMLFERDGYLDSLIFHDSNIRHIILYSNNSPCDEANHCCISKMYNFLMNYPEVTLSVFFSQLYHTENQFPTSAWNREALRGLASLWPQVTLSAISGGIWQSILETFVSGISEGLTAVRPFTAGRTLTDRYNAYEINCITEVKPYFTDALHSWQKENQDQKVWAASENQPLHNTTPAQWQPDMSQDCRTPAVFMLVPYRDLPPIHVNPSPQKPRTVVRHLNTLQLSASKVKALRKSPSGRPVKKEEARKGSTRSQEANETNKSKWKKQTLFIKSNICHLLEREQKKIGILSSWSV

SEQ ID NO: 59 - protein, 363 aa, Macaca fascicularis
  REGION 1..363: note = MISC_FEATURE - mfAPOBEC-4 polypeptide sequence
MEPTYEEYLANHGTIVKPYYWLSFSLDCSNCPYHIRTGEEARVSLTEFCQIFGFPYGTTYPQTKHLTFYELKTSSGSLVQKGHASSCTGNYIHPESMLFEMNGYLDSAIYNNDSIRHIILYCNNSPCNEANHCCISKVYNFLITYPGITLSIYFSQLYHTEMDFPASAWNREALRSLASLWPRVVLSPISGGIWHSVLHSFVSGVSGSHVFQPILTGRALTDRYNAYEINAITGVKPFFTDVLLHTKRNPNTKAQMALESYPLNNAFPGQSFQMTSGIPPDLRAPVVFVLLPLRDLPPMHMGQDPNKPRNIIRHLNMPQMSFQETKDLERLPTRRSVETVEITERFASSKQAEEKTKKKKGKK

SEQ ID NO: 60 - protein, 218 aa, Rattus norvegicus
  REGION 1..218: note = MISC_FEATURE - rAPOBEC-1 (delta 177-186) polypeptide sequence
MSSETGPVAVDPTLRRRIEPHEFEVFFDPRELRKETCLLYEINWGGRHSIWRHTSQNTNKHVEVNFIEKFTTERYFCPNTRCSITWFLSWSPCGECSRAITEFLSRYPHVTLFIYIARLYHHADPRNRQGLRDLISSGVTIQIMTEQESGYCWRNFVNYSPSNEAHWPRYPHLWVRGLPPCLNILRRKQPQLTFFTIALQSCHYQRLPPHILWATGLK

SEQ ID NO: 61 - protein, 218 aa, Rattus norvegicus
  REGION 1..218: note = MISC_FEATURE - rAPOBEC-1 (delta 202-213) polypeptide sequence
MSSETGPVAVDPTLRRRIEPHEFEVFFDPRELRKETCLLYEINWGGRHSIWRHTSQNTNKHVEVNFIEKFTTERYFCPNTRCSITWFLSWSPCGECSRAITEFLSRYPHVTLFIYIARLYHHADPRNRQGLRDLISSGVTIQIMTEQESGYCWRNFVNYSPSNEAHWPRYPHLWVRLYVLELYCIILGLPPCLNILRRKQPQHYQRLPPHILWATGLK

SEQ ID NO: 62 - protein, 198 aa, Mus musculus
  REGION 1..198: note = MISC_FEATURE - mouse cytidine deaminase polypeptide sequence
  REGION 1..30: note = MISC_FEATURE - Nuclear localization sequence
  REGION 183..198: note = MISC_FEATURE - Nuclear export signal
MDSLLMKQKKFLYHFKNVRWAKGRHETYLCYVVKRRDSATSCSLDFGHLRNKSGCHVELLFLRYISDWDLDPGRCYRVTWFTSWSPCYDCARHVAEFLRWNPNLSLRIFTARLYFCEDRKAEPEGLRRLHRAGVQIGIMTFKDYFYCWNTFVENRERTFKAWEGLHENSVRLTRQLRRILLPLYEVDDLRDAFRMLGF

SEQ ID NO: 63 - protein, 224 aa, Petromyzon marinus
  REGION 1..224: note = MISC_FEATURE - pmCDA-1 polypeptide sequence
MAGYECVRVSEKLDFDTFEFQFENLHYATERHRTYVIFDVKPQSAGGRSRRLWGYIINNPNVCHAELILMSMIDRHLESNPGVYAMTWYMSWSPCANCSSKLNPWLKNLLEEQGHTLTMHFSRIYDRDREGDHRGLRGLKHVSNSFRMGVVGRAEVKECLAEYVEASRRTLTWLDTTESMAAKMRRKLFCILVRCAGMRESGIPLHLFTLQTPLLSGRVVWWRV

SEQ ID NO: 64 - protein, 331 aa, Petromyzon marinus
  REGION 1..331: note = MISC_FEATURE - pmCDA-2 polypeptide sequence
MELREVVDCALASCVRHEPLSRVAFLRCFAAPSQKPRGTVILFYVEGAGRGVTGGHAVNYNKQGTSIHAEVLLLSAVRAALLRRRRCEDGEEATRGCTLHCYSTYSPCRDCVEYIQEFGASTGVRVVIHCCRLYELDVNRRRSEAEGVLRSLSRLGRDFRLMGPRDAIALLLGGRLANTADGESGASGNAWVTETNVVEPLVDMTGFGDEDLHAQVQRNKQIREAYANYASAVSLMLGELHVDPDKFPFLAEFLAQTSVEPSGTPRETRGRPRGASSRGPEIGRQRPADFERALGAYGLFLHPRIVSREADREEIKRDLIVVMRKHNYQGP

SEQ ID NO: 65 - protein, 209 aa, Petromyzon marinus
  REGION 1..209: note = MISC_FEATURE - pmCDA-5 polypeptide sequence
MAGDENVRVSEKLDFDTFEFQFENLHYATERHRTYVIFDVKPQSAGGRSRRLWGYIINNPNVCHAELILMSMIDRHLESNPGVYAMTWYMSWSPCANCSSKLNPWLKNLLEEQGHTLMMHFSRIYDRDREGDHRGLRGLKHVSNSFRMGVVGRAEVKECLAEYVEASRRTLTWLDTTESMAAKMRRKLFCILVRCAGMRESGMPLHLFT

SEQ ID NO: 66 - protein, 158 aa, Saccharomyces cerevisiae
  REGION 1..158: note = MISC_FEATURE - yCD polypeptide sequence
MVTGGMASKWDQKGMDIAYEEAALGYKEGGVPIGGCLINNKDGSVLGRGHNMRFQKGSATLHGEISTLENCGRLEGKVYKDTTLYTTLSPCDMCTGAIIMYGIPRCVVGENVNFKSKGEKYLQTRGHEVVVVDDERCKKIMKQFIDERPQDWFEDIGE

SEQ ID NO: 67 - protein, 194 aa, synthetic construct
  REGION 1..194: note = cytidine deaminase polypeptide sequence
MKPQIRDHRPNPMEAMYPHIFYFHFENLEKAYGRNETWLCFTVEIIKQYLPVPWKKGVFRNQVDPETHCHAEKCFLSWFCNNTLSPKKNYQVTWYTSWSPCPECAGEVAEFLAEHSNVKLTIYTARLYYFWDTDYQEGLRSLSEEGASVEIMDYEDFQYCWENFVYDDGEPFKRWKGLKYNFQSLTRRLREILQ

SEQ ID NO: 68 - protein, 192 aa, synthetic construct
  REGION 1..192: note = cytidine deaminase polypeptide sequence
MADSSEKMRGQYISRDTFEKNYKPIDGTKEAHLLCEIKWGKYGKPWLHWCQNQRMNIHAEDYFMNNIFKAKKHPVHCYVTWYLSWSPCADCASKIVKFLEERPYLKLTIYVAQLYYHTEEENRKGLRLLRSKKVIIRVMDISDYNYCWKVFVSNQNGNEDYWPLQFDPWVKENYSRLLDIFWESKCRSPNPW

SEQ ID NO: 69 - protein, 280 aa, synthetic construct
  REGION 1..280: note = cytidine deaminase polypeptide sequence
MDPQRLRQWPGPGPASRGGYGQRPRIRNPEEWFHELSPRTFSFHFRNLRFASGRNRSYICCQVEGKNCFFQGIFQNQVPPDPPCHAELCFLSWFQSWGLSPDEHYYVTWFISWSPCCECAAKVAQFLEENRNVSLSLSAARLYYFWKSESREGLRRLSDLGAQVGIMSFQDFQHCWNNFVHNLGMPFQPWKKLHKNYQRLVTELKQILREEPATYGSPQAQGKVRIGSTAAGLRHSHSHTRSEAHLRPNHSSRQHRILNPPREARARTCVLVDASWICYR

SEQ ID NO: 70 - protein, 555 aa, synthetic construct
  REGION 1..555: note = pYY-BEM3.1; tr|F7B644|F7B644_HORSE polypeptide sequence
MPRGRARERQRRNPMEKLDAEAFSFHFLNMEFVYDRNCSYLCYQVEGRLSGSPVLSEQGVFPNEVCGKTRRHAELCFLDWFRGRLSPDEYYCVTWFISWSPCSNCAREVAEFLKRHRNVELSIFAARLYYCRDHEQGLQSLCNRGAQLAVMLRKDFTYCWDNFVHNSGREFSPWENIDANSDLLARKLEDLLKNPMEKLHRKTFSFHFRNLKFAKGRKCSYLCYRVEGRLSGSPGLSEQGVFLNEVCDENCRHAELCFLHWFRGRLSPHADYRVTWFISWSPCSNCAREVAEFLKQHRNVELHISAARLYYWQRNKPGLRNLRSSGAQLAIMFFWDFRDCWDNFVHNSGRHFIPWKKINVNSRLLATKLEDLLKNPLEKLHPNTFSFHFCNLEFAYDRKYSYLCYQVEGRLSGSPGLSEQGVFLNEVCGKTRCHAELCFLDWFRVRLSPDEYYRVTWFISWSPCFYCAREVADFLKQYRNVKLSIFAARLYYCRDHAQGLRSLCSSGAQLAIMFFWDFRYCWDNFVHNSGREFRPWKKINVNSRLLATKLEDILK

SEQ ID NO: 71 - protein, 437 aa, synthetic construct
  REGION 1..437: note = pYY-BEM3.2; tr|D1LZA1|D1LZA1_PANTI polypeptide sequence
MEPWRPSPRNPMDRIDPKTFRFQFPNLRYASGRKLCYLCFQVERDYFYYNDSDWGVFRNEVHPWAPCHAEQCFLSWFRDQYPYRDEDYNVTWFLSWSPCPTCAEEVVEFLEEYRNLTLSIFTSRLYYFWHPNYQEGLCKLWDAGVQLDIMSCDEFEYCWDNFVYHKGMRFQRRNLLKDYDFLAAKLQEILSPGQQRKRDWPFPPRPGAQVDPRSWVQEVTEPGINTRRHPLHLLVSFLLPRPTMNPLQEDIFYRQFGNQHRVPKPYYYRRKTYLCYQLKLPEGTLIDKDCLRNKKKRHAEICFIDKIKSLTRDTSQRFEIICYITWSPCPFCAEELVAFVKDNPHLSLRIFASRLYVHWRWKYQQGLRHLHASGIPVAVMSLPEFEDCWRNFVDHQDRLFQPWRNLDQYSESIKRRLGKILTPLNDLRNDFRNLKLE

SEQ ID NO: 72 - protein, 440 aa, synthetic construct
  REGION 1..440: note = pYY-BEM3.3; tr|A0A3Q0DM17|A0A3Q0DM17_TARSY polypeptide sequence
MPMKRMYSNIYFDHFNNQRLLSGQNAPWLCFKVERVENCMLVPLETGVFGNQVSGCCGKTERPVEPTSLTRSVLVSPNPGTELRAQQPSRKGHLGKLGCVEYPSPGLALVMLGYGASTYCPDSSMYCPETCHHPEMCFLYWFEKTLSHEEQYQITWYVSWSPCVNCAEEVAEFLSVHPKVNLTIYAARLYCYQKLNHRQGLRRLCKEGACVKIMNYEEFDHCWENFVYNNYKSFKPWVKLQDNYELLATELDKILRIPMERMPQKKFRFHFQNLIAKDRNTTWLCFEVKNVRKKHPPDLLERGIFQNQVTPRINCHAEMCFLSWFLENMLLHGKRYQVTWYISWSPCSICAEEVAEFLSAHPKVSLTIYAARLYYFWVPGYRQGLRRLVEEGARVEIMNYEEFDYCWENFVSINNEPFQPWEGLHEKYGYLVTKLNNILG

SEQ ID NO: 73 - protein, 453 aa, synthetic construct
  REGION 1..453: note = pYY-BEM3.4; tr|A0A3Q0DNJ5|A0A3Q0DNJ5_TARSY polypeptide sequence
MEDNPEPRPRQQMDQDTFIFNFNNDPSVRGRHQTFLCYEVEHLDDDTWVPQDKYLGFLHNQPQSRSNAYCAYHAELCFLELVSSWQLDPAQRYRVTCFISWSPCSSCAQEVAAFLKKNRHVTLRILAARIYDYYQGYEDGLRTLQGVGVDITVMTSAEFGHCWNTFVDHQGSPFQPWEGLDQHSQVIWQRMQDILQVIPAKYLMEKVKYTVTVDILFKGRVPGPRYLMDQNTFTRNFINNLSVSGRRQTLLCYEVERLGGDIWVPLDQLRGFLLSQARDVLNYYQGRHAEPCFLDLVSSWQLDPAQHYRVTWFISWSPCTSCAQAVAAFLRENRHVTLRILAARIYDYHQGYEEGLRTLQRTGAHIDIMTFKEFGHCWNTFVNHKGSPFKSWTGLDQHSQALRKRLQDILHTMASSLWDQSEPKKPIPSQEVTLPESIPPSHGNRFRLVKRPS

SEQ ID NO: 74 - protein, 424 aa, synthetic construct
  REGION 1..424: note = pYY-BEM3.5; tr|G5AYU5|G5AYU5_HETGA polypeptide sequence
FCFLSCVHRKPIERIYKKAFRFYFRNLRCAYGRNKTFLCYEVKRERDNKVLHKGVVLNQVEPYMPLHAELRFLSWFHDTLLCPLGSYQVTLYVSWSPCSECAEELTTFLAGHRNVTMTIYVAQLYYCNWKSPNREGLKILIAEDARLRVMFYDEFLYCWRNFVKNDYNNFDPWSLLDENSRYHNRILQNILKGWGRPHRVGPEGEQTATPGGSGGHCISVFSLLRRREMTLKEETFRVQFNNAYKAPKPYRRRVTYLCYQLQEANGDPLTKGCLRTKKGYHAESRFIKRICSMDLGQDQSYQVTCFLTWSPCPHCAQELVSFKRAHPHLRLQIFTARLFFHWKRSYQEGLQRLCRAQVPVAVMGHPEFAYCWDNFVDHQPGPFEPPWAKLEYYSSCLKRRLQQILRSWGVDDLTNDFRNLQLGP

SEQ ID NO: 75 - protein, 385 aa, synthetic construct
  REGION 1..385: note = pYY-BEM3.6; tr|A0A2Y9QMV5|A0A2Y9QMV5_TRIMA polypeptide sequence
MLSSPQTPGTRKPMKTLAPDEFSFNFENLRLAHGRNTTFLCFQVETKAPPSLNSPDSGIFQNQDHCPSHHHAEMVFLTWFQKRLSPAQHYEVTWYMSWSPCSRCAVQVAKFLKSNSTVNLSIFVARLYYPRELETKDGLHSLWQAGAQVQIMFFQDFKYCWENFVNNEGKPFQPWKNLDENSKDWDTELKDIHRNTTDLLTEEMFYSQFYNREKKSSIPRKTYLCYQLNEPQPVKRCLHYKKGYHAVTRFIDGIVSMNLDPARSYDITCYFTWSPCNRYARKLVSFIEDYPNLRLKVYTSRLYFHWCWTNMQGLQHLQNSRVTVAVMTFRDFEYCWKNFVDNQGKPFEPWEKLDLYSQSTERRLRRILKPLTPDVLNEDFGNLHL

SEQ ID NO: 76 - protein, 381 aa, synthetic construct
  REGION 1..381: note = pYY-BEM3.7; tr|H0XHI0|H0XHI0_OTOGA polypeptide sequence
LSCAFRDPMNRMYPKTFCQNFEKEPCPSNQNSSWLCFEVETKNSAVFFHRGVFRNQPAPPPRAPTSVLLSQGPVKTPCHAEECFLTWIQGVLPPDHHYHVTWYVSRGPCANCANLIVHFLAMHRRVTLTIFAAHLNFFWESDFQQGLLRMDQEGVQLHIMGYEEFEYCWDNFVYNQRKQFVPWNGLNENYEFMVSTLEDILRSPLDRIRQKDFSIHFRNSLWLDDKSTWLCFEVKRTKSPVPLYRGVFRNQSPPKTPCHAEVRFFTWLQDLPPDFCCQFTWYLSWSPCADCADLVANFLAKHRNVSLTIFVARLYYYRDPEMHRGLRRMYQEGANVDIMSVIEFEYCWDNFVYNQGKQFVPWNGLNENYEFLVPRLQEILE

SEQ ID NO: 77 - protein, 337 aa, synthetic construct
  REGION 1..337: note = pYY-BEM3.8; tr|A0A3M0K4Y7|A0A3M0K4Y7_HIRRU polypeptide sequence
MYISKKALRRHFDPRVYPRETYLLCELQWEGSRRVWIHWIRNVPDHHAEEYFLEEVFEPRNYGFCNITLYLSWSPCCTCCSKIRDFLKRNPNVKIDIRVARLIYPDYAETRSSLRELNGLQRVSIQVMEAAGLSCIESKNHRISQVERDPKGSSSPTLFTLQDHLKLSNMTESVIQDSVSIQICYQMRILGFQCHIRWKLQPEDFQRNYSPNQIGRVVYLLYEVRWRRGSIWRNWCSNNPEQHAEVNFLENHFHHRPQTPCSITWFLSTSPCGKCSRRILEFLKSQPNVTLEIYAAKLFRHHDIRNRQGLRNLMMNGVTIYIMNLEGNPASLCLSVD

SEQ ID NO: 78 - protein, 237 aa, synthetic construct
  REGION 1..237: note = pYY-BEM3.9; tr|A0A3P4LUZ8|A0A3P4LUZ8_GULGU polypeptide sequence
MSFEDYEYCWETFVDHKGMYFQSWDLLRDNDLLAAELKNILRSTMNPLRQEIFYHQFGNQPRAPRPYHRRKTYLCYQLQPHEGPITARVCLQNKKKRHAEIRFIDNIRALRLDRSQTFEITCYLTWSPCPTCAKALAVFVQDHPHISLRLFASRLFIHWCWKYQEGLRLLHRSRIPVAVMRLQEFEDCWRNFVDNQDEPFQPWNKLEQYSESITRRLRRILGHPQNNLENDFRNLHI

SEQ ID NO: 79 - protein, 221 aa, synthetic construct
  REGION 1..221: note = pYY-BEM3.10; tr|G5BPM8|G5BPM8_HETGA polypeptide sequence
RRRIEPWQFEASFDPRQLRRETCLLSEVRWGTSPRAWRGCSLNTARHAEVSFMDRLTSEGRLRGPVRCSITWFLSWSPCGACAQAIGEFLRQHPNVSLVIYIARLFWHVDEQNRQGLRDLVTRGVRMQVMSDPEFAHCWRNFVNYSPGQEARWPQVPPVWTWLYSLELHCILLNLPPCLKISRRHHNQLTFFQLILQNCHYQAIPSPVLLASGLIHPFVTW

SEQ ID NO: 80 - protein, 211 aa, synthetic construct
  REGION 1..211: note = pYY-BEM3.11; tr|H2M862|H2M862_ORYLA polypeptide sequence
MITKLDSVLLPKKKFIYHYKNMRWARGRHETYLCFVVKRRVGPESLSFDFGHLRNRNGCHVELLFLRHLSALCPGLWGYGATGQGRVSYSITWFCSWSPCANCSFRLAQFLSQTPNLRLRIFVSRLYFCDLEDSREREGLRMLKKVGVHITVMSYKDYFYCWQTFVARKQSKFKPWDGLHQNSVRLSRKLNRILQPCETEDFRDAFKLLGL

SEQ ID NO: 81 - protein, 353 aa, synthetic construct
  REGION 1..353: note = pYY-BEM3.12; tr|H0Y0C6|H0Y0C6_OTOGA polypeptide sequence
MYLKTFYRHFNNRPYLSRRNDTWLCFEVKTTSSNSPGSFYSGVFRNQGPRYCPWHTELCFLTWVRPIVSHHHFYQITWYMSWSPCANCAWQVATFLATHENVSLTNYTVRIYYFWRQDYRQGLLRMIEEGTQVYVMSSKEFQHCWENFVDHWGTRWVTCWNRLKKNYEFLVTRLSEILSDPKERISPNTFYNQFNNTPVPRGRKDTWLCFEVKEKNSNSPGSFHRGVFQNQVFSGTSSHARRCPPDHHYEVTWYTSWSPCAHCAWHVVNFLTSNPNVSLTIFAARLYYIYRPEIQQGLRRVFQEGAKVHIMSLKEFKYCWAKLVYNSGMRFMPWYQFNFNFLFPNTTLKGDLH

SEQ ID NO: 82 - protein, 189 aa, synthetic construct
  REGION 1..189: note = pYY-BEM3.13; tr|A0A3Q2Z5X6|A0A3Q2Z5X6_HIPCM polypeptide sequence
MDVHFMNFIYHYKNMRWAKGRNETYLCFVVKRRVGPNSLTFDFGHLRNRNGCHVELLFLRYLGRRLSYSITWFCSWSPCANCSAALSQFLSRMPNLRLRIFVARLYFCDMEDSHEREGLRLLQKAGVQVTVMSYKDYYYCWQTFVDRKKSHFKAWEDLHQNSVRLSRKLNRILQPCEMDLRDAFKLLGL

SEQ ID NO: 83 - protein, 190 aa, synthetic construct
  REGION 1..190: note = pYY-BEM3.15; tr|A0A2K6NY90|A0A2K6NY90_RHIRO polypeptide sequence
MNPHIRNPMEAMYPGTFYFHFKNLWEADNRNESWLCFAVEVIKHHSTVSWKRGVFRNQVDPETHCHAEKCFLSWFCDNTLSPKKNYQVTWYTSWSPCPECAREVAKFLARHSNVMLTIYTARLYYSQYPNYQEGLRRLNEEGVPVEIMDYEDFKYCWENFVYNGDELFKPWKGLKYNFLFLDSKLQEILE

SEQ ID NO: 84 - protein, 202 aa, synthetic construct
  REGION 1..202: note = pYY-BEM3.16; tr|Q6ICH2|Q6ICH2_HUMAN polypeptide sequence
MNPQIRNPMERMYRDTFYDNFENEPILYGRSYTWLCYEVKIKRGRSNLLWDTGVFRGPVLPKRQSNHRQEVDPETHCHAERCFLSWFCDDILSPNTNYEVTWYTSWSPCPECAGEVAEFLARHSNVNLTIFTARLCYFWDTDYQEGLCSLSQEGASVKIMGYKDFVSCWKNFVYSDDEPFKPWKGLQTNFRLLKRRLREILQ

SEQ ID NO: 85 - protein, 202 aa, synthetic construct
  REGION 1..202: note = pYY-BEM3.17; tr|G8GPV1|G8GPV1_CERNE polypeptide sequence
MDGSPASRPGHVMDPGTFTSNFNNKPWVSGQRETYLCYKVERSHNDTWVLLNQHRGFLRNQAKNRLHGDYGCHAELCFLGEVPSWRLDPTQTYRVTWFISWSPCFSGGCAEQVRAFLQENTHVRLRIFAARIYDYDFLYQEALRTLRDAGAQVSIMTYEEFKHCWDTFVDHQGRPFQPWDGLDEHSQALSGRLQAILQNQGN

SEQ ID NO: 86 - protein, 181 aa, synthetic construct
  REGION 1..181: note = pYY-BEM3.18; tr|Q1WBT6|Q1WBT6_SYMSY polypeptide sequence
MALLTAKTFRLQFNNKRRVTKPYYPRKALLCYQLTPQNGSTPTRGYFKNKKKRHAEIRFINKIKSMGLDETQCYQVTCYLTWSPCPSCAWELVDFIKAHDHLNLGIFASRLYYHWCRHQQEGLRLLCGSQVPVEVMGFPEFADCWENFVDHEEPLSFNPSEMLEELDKNSRAIKRRLEKIK

SEQ ID NO: 87 - protein, 211 aa, synthetic construct
  REGION 1..211: note = pYY-BEM3.19; tr|A0A3B4CS14|A0A3B4CS14_PYGNA polypeptide sequence
MDNTNRRKFIYHYKNVRWARGRHETYLCFVVKKRNSPDSLSFDFGHLRNRNGCHVELLFLRYIEVLCPGLWGSGVDGVRVSYAVTWFCSWSPCSNCAQRLTNFLSQTPNLRLRIFVARLYFCDEEDSLEREGLRHLQRAGVQITVMTYKDFFYCWQTFVASRERCFKAWEGLRQNSVRLSRKLNRILQVFISTPVISPLITTHLGQSWAGG

SEQ ID NO: 88 - protein, 315 aa, synthetic construct
  REGION 1..315: note = pYY-BEM3.20; tr|A0A087XZI4|A0A087XZI4_POEFO polypeptide sequence
RKVSYSVTWFCSWSPCANCSIRLAQFLHQTPNLRLRIFVSRLYFCDLEDSREREGLRILKKAGVHITVMSYKDYFYCWQTFVAKSQSKFKPWDGLHQNYIRLSRKLNRILQPALDIKKFIYHYKNLRWARGRCETYLCFVVKKKLHLFMFVIVGRNRLFDLNVTMNNKSLYLIPLHLQLLFLRHLGALCPGLWGYGVTGERKVSYSVTWFCSWSPCANCSIRLAQFLHQTPNLRLRIFVSRLYFCDLEDSREREGLRILKKAGVHITVMSYKDYFYCWQTFVAKSQSKFKPWDGLHQNYIRLSRKLNRILQVQFF

SEQ ID NO: 89 - protein, 189 aa, synthetic construct
  REGION 1..189: note = pYY-BEM3.21; tr|A0A341AEK4|A0A341AEK4_9CETA polypeptide sequence
MASDRGPSAGDATSRRRIEPWEFEVSFDPRELCKETRLLYEIKWGRSQHVWRHSGKNTTNHVECNFIEKFTSERPFHRSVSCCITWFLSWSPCWECSKAIREFLNQHPRVTLFIYVARLFQHMDPQNRQGLRDLIHSGVTIQIMGPTEYDYCWRNFVNYPPGKEAHWPRYPPPLMKLYALELHCIILVP

SEQ ID NO: 90 - protein, 180 aa, synthetic construct
  REGION 1..180: note = pYY-BEM3.22; tr|E2D879|E2D879_MUSMI polypeptide sequence
RNLISRETFNFNFENLCYAKGRKNTFLCYEVTRKDCDSPVSLCHGVFKNKGSIHAEICFLYWFHDKVLKVLTPREEFKVTWYMSWSPCFECAEQVVRFLATHHNLNLTIFSSRLYNVSDPDTQQKLCRLVQEGAQVAVMDLSEFKKCWEKFVDNDGQQFRPWKRLRTNFRYQNSKLQEIL

SEQ ID NO: 91 - protein, 221 aa, synthetic construct
  REGION 1..221: note = pYY-BEM3.23; tr|A0A2K5RDN6|A0A2K5RDN6_CEBCA polypeptide sequence
MWEAQSPGLSREWGSVAISPEDPGPLHIGRFLSCAFRHPMNAMYPGIFNFHFRNLRKAYGRNETWLCFTVEGIMNRSTVSWKSGVFRNQVGSDPFCHAEMCFLSWFRHNMLSPKKDYEVTWYASWSPCPECAGQVAEFLARHGNVRLTIFTAHLYYFWNPSFRQGLRRLSQEGASVLIMGYEDFEYCWDNFVYNDGQPFKPWKRLQDNSLSLYITLQEILQ

SEQ ID NO: 92 - protein, 206 aa, synthetic construct
  REGION 1..206: note = pYY-BEM3.24; tr|A0A2K5RDN7|A0A2K5RDN7_CEBCA polypeptide sequence
MEASPASRPRPLMGPRTFTENFTNNPEVFGRHQTYLCYEVKCQGPDGTRDLMTEQRDFLCNQARNLLSGFDGRHAERCFLDRVPSWRLDPAQTYRVTCFISWSPCFSCAREVAEFLQENPHVNLRIFAARIYDCRPRYEEGLQMLQNAGAQVSIMTSEEFRHCWDTFVDHQGHPFQPWEGLDEHSQALSRRLQAILQGNRWMILSL

SEQ ID NO: 93 - protein, 184 aa, synthetic construct
  REGION 1..184: note = pYY-BEM3.25; tr|A0A1C9CJ69|A0A1C9CJ69_CERAL polypeptide sequence
NPMKAMDPHIFYFHFKNLRKAYGRNETWLCFAVEIIKQRSTVPWRTGVFRNQVDPESHCHAERCFLSWFCEDILSPNTDYRVTWYTSWSPCLDCAGEVAEFLARHSNVELAIFAARLYYFWDTHYQQGLRSLSEKGASVEIMGYEDFKYCRENFVCDDGKPFKPWKGLKTNFRFLKRRLQEILE

SEQ ID NO: 94 - protein, 197 aa, synthetic construct
  REGION 1..197: note = pYY-BEM3.26; tr|A0A2R2Z4D2|A0A2R2Z4D2_PTEAL polypeptide sequence
MHLQVWRKVTEAWREGYTLKPWSRNPMERLYHDYFYFHFYNLPTPKHRNGCYICYQVEGTKKHSRMPLLRGVFENQESLDMMLSPGEKYRVTWYISWSPCFACVDEVIKFLREHTNVELIIFAARLYHSDILQYRQGLRKLHDAGVHVAIMSYYEFKHCLNDFVFHQGRSFCPWNDLNKNSKNLSNTLEDILRNQED

SEQ ID NO: 95 - protein, 206 aa, synthetic construct
  REGION 1..206: note = pYY-BEM3.27; tr|B7T161|B7T161_SHEEP polypeptide sequence
MTEGWAGSGLPGRGDCVWTPQTRNTMNLLRETLFKQQFGNQPRVPPPYYRRKTYLCYQLKELDDLMLDKGCFRNKKQRHAEIRFIDKINSLNLNPSQSYKIICYITWSPCPNCASELVDFITRNDHLNLQIFASRLYFHWIKPFCRGLHQLQKAGISVAVMTHTEFEDCWEQFVDNQLRPFQPWDKLEQYSASIRRRLQRILTAPT

SEQ ID NO: 96 - protein, 205 aa, synthetic construct
  REGION 1..205: note = pYY-BEM3.28; tr|A0A2R2X2G4|A0A2R2X2G4_PTEAL polypeptide sequence
MAGLGQACEGCCGQMPEISYPMGRLDPKTFSFEFKNLPYAYGRKSSYLCFQVEREQHSSPVPSDWGVFKNQFCGTEPYHAELCFLNWFRAEKLSPYEHYDVTWFLSWSPCSTCAEEIAIFLSNHKNVRLNIFVSRIYYFWKPAFRQGLQELDHLGVQLDAMSFDEFKYCWENFVDNQGMPFRCWKKVHQNYKSVLRKLNEILRRR

SEQ ID NO: 97 - protein, 309 aa, synthetic construct
  REGION 1..309: note = pYY-BEM3.29; tr|G1Q1M4|G1Q1M4_MYOLU polypeptide sequence
YAELSFLDLFQSWNLDRGRQYRLTWYMSWSPYPDCAQKLVEFLGENSHVTLRIFAADIHSLCSGYEDGLRKLRDARAQLAIMTRDELQYCWVTFVDNQGQPFRPWPNLVEHIKTKKQELKDILGNPMRRMYPKTFNFNFQNLNSYGRKSTFLCFEVETWEDGSVLDYQNGVFQNQLDPGHAELCFIEWFHEKVLFPDEVRCPDAQYHVTWYISWSPCFECAEQVAGFLNEHENVDLSISAARLYLCEDEDEQGLQDLVAAGAKVAMMAPEDFEYCWDNFVYNRGWPFTYWKHVRRNYGRLQEKLDEILW

SEQ ID NO: 98 - protein, 216 aa, synthetic construct
  REGION 1..216: note = pYY-BEM3.30; tr|A0A1S3AN78|A0A1S3AN78_ERIEU polypeptide sequence
RRIEPWEFEDFFDPRQFRPETCLLYEVRWGSSRNAWRSTARNTTRHAEVNFLERFAAERHFDKPVSCSITWFLSWSPCWECSQAIGAFLSQHPQVTLAIHVTRLFHHEDEQNRQGLRDLLARGVTLQVMGDSEYAHCWRTFVNSPPGAEGHYPRYPSDFTRLYALELHCIILGLPPCLEILRRYQNQFTLFRLVPQNCHYQMIPHLNFFVVRHYFF

SEQ ID NO: 99 - protein, 201 aa, synthetic construct
  REGION 1..201: note = pYY-BEM3.32; tr|Q4VUI3|Q4VUI3_XENLA polypeptide sequence
MTMDSMLLKRNKFIYHYKNLRWARGRHETYLCYIVKRRYSSVSCALDFGYLRNRNGCHAEMLFLRYLSIWVGHDPHRNYRVTWFSSWSPCYDCAKRTLEFLKGHPNFSLRIFSARLYFCEERNAEPEGLRKLQKAGVRLSVMSYKDYFYCWNTFVETRESGFEAWDGLHENSVRLARKLRRILQPPYDMEDLREVFVLLGL

SEQ ID NO: 100 - protein, 191 aa, synthetic construct
  REGION 1..191: note = pYY-BEM3.33; tr|E2RL86|E2RL86_CANLF polypeptide sequence
MNPLQEETFYQQFSNQRVPKPTYQRRTYLCYQLKPHEGSVIAKVCLQNQEKRHAEICFIDDIKSRQLDPSQKFEITCYVTWSPCPTCAKKLIAFVNDHPHISLRLFASRLYFHWRQKYKRELRHLQKSGIPLAVMSYLEFKDCWEKFVDHKGRPFQPWNKLKQYSESIGRRLQRILQPLNNLENDFRNLRL

SEQ ID NO: 101 - protein, 226 aa, synthetic construct
  REGION 1..226: note = pYY-BEM3.34; tr|G1LWB0|G1LWB0_AILME polypeptide sequence
SSAAPASIHLLDEDTFTENFRNDDWPSRTYLCYKVEGPDQGSGVPLGQDKGILHNKPAQGPEPSRHAECYLLEQIQSWNLDPKLHYGVTCFLSWSPCAKCAQKMARFLQENSHVSLKLFASRLYTRERWDEDYKEGLRTLKRAGASIAIMTYREFEHCWKTFVLHDQEGSCFQPWPFLHKESQKFSEKLQAILQVGVLLLSLPPPLPSSPLSSPWPFPAPLRASTG

SEQ ID NO: 102 - protein, 238 aa, synthetic construct
  REGION 1..238: note = pYY-BEM3.35; tr|A0A1U7S7K7|A0A1U7S7K7_ALLSI polypeptide sequence
MGEHWQYAGSGEYIPQDQFEENFDPSVLLAETHLLSELTWGGRPYKHWYENTEHCHAEIHFLENFSSKNRSCTITWYLSWSPCAECSARIADFMQENTNVKLNIHVARLYLHDDEHTRQGLRYLMKMKRVTIQVMTIPDYTYCWNTFLEDDGEDESDDYGGYAGVHEDEDESDDDDYLPTHFAPWIMLYSLELSCILQGFAPCLKIIQGNHMSPTFQLHVQDQEQKRLLEPANPWGAD

SEQ ID NO: 103 - protein, 220 aa, synthetic construct
  REGION 1..220: note = pYY-BEM3.36; tr|A0A2R2X2J8|A0A2R2X2J8_PTEVA polypeptide sequence
MPRIGNMNLLSEKTFNYHFGNQLRVKKPQGRRRTYLCYKLKLPNETLVKGYFINKKKNHAEIRFINKIRSLNLDQTQSYKITCYITWSPCSYCAGKLVALVKSCPHLSLQIFTSRLYYHWLWKNQAGLRYLWKINISVLVMKEPEFADCWDNFVNHQSRRFKPWEKLTQYSNSTERRLLRILRINRTDLFLAQSSEQDPGLNDLVDAIKRLFLDAHRPRD

SEQ ID NO: 104 - protein, 198 aa, synthetic construct
  REGION 1..198: note = pYY-BEM3.37; tr|A0A151P6M4|A0A151P6M4_ALLMI polypeptide sequence
MAVEEEKGLLGTSQGWKIELKDFQENYMPSTWPKVTHLLYEIRWGKGSKVWRNWCSNTLTQHAEVNCLENAFGKLQFNPPVPCHITWFLSWSPCCQCCRRILQFLRAHSHITLVIKAAQLFKHMDERNRQGLRDLVQSGVHVQVMDLPDYRYCWRTFVSHPHEGEGDFWPWFFPLWITFYTLELQHILLQQHALSYNL

SEQ ID NO: 105 - protein, 158 aa, synthetic construct
  REGION 1..158: note = pYY-BEM3.38; tr|A0A2K6MNR2|A0A2K6MNR2_RHIBE polypeptide sequence
IWLCFTMEIIKQCSTVSWKRGVFRNQVDPETHCHAERCFLSWFWEDTLSPNTNYQVTWYTSWSPCLDCAGEVAEFLARHSNVKLAIFAARLYYFWDTDYQQGLRSLSEEGTSVEIMGYEDFKYCWENFVYNGDEPFKPWKGLKYNFLFLDSKLQEILE

SEQ ID NO: 106 - protein, 182 aa, synthetic construct
  REGION 1..182: note = pYY-BEM3.40; tr|F1CGT0|F1CGT0_ANOCA polypeptide sequence
KAAILLSNLFFRWQMEPEAFQRNFDPREFPECTLLLYEIHWDNNTSRNWCTNKPGLHAEENFLQIFNEKIDIKQDTPCSITWFLSWSPCYPCSQAIIKFLEAHPNVSLEIKAARLYMHQIDCNKEGLRNLGRNRVSIMNLPDYRHCWTTFVVPRGANEDYWPQDFLPAITNYSRELDSILQD

SEQ ID NO: 107 - protein, 230 aa, synthetic construct
  REGION 1..230: note = pYY-BEM3.41; tr|C7AGG3|C7AGG3_HORSE polypeptide sequence
MDPQAPTQRGGLGQAYQGGDYVQAPGNGNTQHLLSEDVFKKQFGNQRRVTKPYYRRKTYVCYQLKLLRGPTIAKGYFRNKKKRHAEIRFIDKINSLGLDQDQSYEITCYVTWSPCATCACKLIKFTRKFPNLSLRIFVSRLYYHWFRQNQQGLRQLWASSIPVVVMGYQEFADCWENFADNRGNPFQSWEKLTEYSKGIKRRLQKILEPLNLNGLEDAMGNLKLGSVDLG

SEQ ID NO: 108 - protein, 197 aa, synthetic construct
  REGION 1..197: note = pYY-BEM3.42; tr|A0A250YMK7|A0A250YMK7_CASCN polypeptide sequence
MSLLKEDIFLYQFNNQQQVQKPYFRRRTYLCYQLEQPNGSRPQWPAKGCLQNKKGHHAEIRFIKRIHSMGLEQDQDYQITCYITWSPCLACACALAELKNHFPRLTLRIFASRLYFHWIRKFQMGLQHLYKSGVLVAVMSLPEFTDCWEKFVNHRQVFFTPWDKLEEHSRSIQRRLRRILQSWDVDDLTDDFRNLRL

SEQ ID NO: 109 - protein, 189 aa, synthetic construct
  REGION 1..189: note = pYY-BEM3.43; tr|B7T160|B7T160_SHEEP polypeptide sequence
MPWISDHVARLDPETFYFQFHNLLYAYGRNCSYICYRVKTWKHRSPVSFDWGVFHNQVYAGTHCHSERRFLSWFCAKKLRPDECYHITWFMSWSPCMKCAELVAGFLGMYQNVTLSIFTARLYYFQKPQYRKGLLRLSDQGACVDIMSYQEFKYCWKKFVYSQRRPFRPWKKLKRNYQLLAAELEDILG

SEQ ID NO: 110 - protein, 541 aa, synthetic construct
  REGION 1..541: note = pYY-BEM4.1; tr|A0A182D0J1|A0A182D0J1_BLAVI polypeptide sequence
MTNPESPPQAPCDFNEDALLNREPLRGSPIKFVSPVDYPDLVFALAGPVGVDIDYIQQSISDCLKSFDYSTEFIRITEIMQDIKCSKTIDCTDMLKEYQSKIEYANELRRAYRAKDLLAALTISAISKLREQIKERDEATNKSNIQPSRRKLAWVVRQLKTPEEVRLLRAVYGKQFVLVSIYSSPQRREDFLISKIKIKSRGTIDNNTSSEGAQRLIERDSKEDNEYGQNLSGTFCLGDIFVDSNNKESAIVSIDRFLNAFFGSNEISPTRDEYGMYLAKTASLRSCDLSRQVGAAIFSKTGEIISLGSNEVPKAGGGTYWTGDNADSRDIRLGHDPNEINKVEIFAEIISRLLEDKLLSNDLLNKDAASIVTILLSKNEGKRYKDLRVMDIIEFGRIIHAEMSAICDAARNGRAIIGATLFCTTFPCHLCAKHIVASGIGRIVYLEPYPKSYAKKLHSDSIQVEDHSDSEKVSFEPFIGISPSRYRELFEGGRRKDPFGEALKWKNDPRKPVIDVVVPPHFEAEKLVIAQLGKLIVSGTG

SEQ ID NO: 111 - protein, 330 aa, synthetic construct
  REGION 1..330: note = pYY-BEM4.2; tr|A0A2D6EXD2|A0A2D6EXD2_9ARCH polypeptide sequence
MIIGLVGTIGAGKQTIIDYLQEKYGYNALSCSDVLREILKKQGKPVTRDNLREIGNKTREEGGNGAIAKILLEKLRNNWKANYIVDSLRHPDEVSVLRTSPLFHLVAVDADLRIRFERVKARKREEEPTTLPAFVERDQKEMFGTGNEQRIRETMELADELVLNNGTVEELKQRIDDLNLVSDERLRPSWDDYFMRLARLAAQRSNCMSRKVGAIITKDRRVIATGYNGTPRGVKNCNEGGCERCNSAVAKGTAISECLCLHGEENAIIEAGRVRSEGATIYTSFLPCLWCTKMIIQAGLKEVVFSEVYDLHEASIKLFETSGVLIRRLK

SEQ ID NO: 112 - protein, 367 aa, synthetic construct
  REGION 1..367: note = pYY-BEM4.3; tr|F7YVM7|F7YVM7_9THEM polypeptide sequence
MNEFKYMSLALKLAKKGKYTTSPNPMVGAVIVKDGKILATGYHKKAGQPHAEINALSKLNFQAQNCEMYVTLEPCSHYGRTPPCADAIIRSGIRKVVIATLDPNPLVNGKGVEKLKNAGIEVVCGVLEEKAKKLNEKFFKYITTKIPFVALKIAQTLDGKIALKNGESKWITSEKSREYVHKLRMEYDAVLTGIGTILKDDPQLNVRLKKVYKQPLRIILDSKLKIPLSAKVLEDPSKVIILTTALADKEKLEELRSKGVEVIITNEKNGIVDLESALKILGEKKITSVMVEAGPTLLTSFLKESLFDKIYLFIAPKIFGADSKSVFSELGLEDISKSQKFSLESVKKIGEDLLLELYPKQLKKLEE

SEQ ID NO: 113 - protein, 449 aa, synthetic construct
  REGION 1..449: note = pYY-BEM4.4; tr|A0A3M6UNF1|A0A3M6UNF1_9CNID polypeptide sequence
MEEKSELENELMRSTSPKPSVPNGSKGNECEQRETRITKENLYMVLALWMEEFPVVEQTSSAKRLNKVGVVFVLPTDRVLAADCSRDGVHGVARVMVNHCGKLEGCKVFVSRKPCSLCAKLLVQSKVSRVFYLPIEPESENKGEIARADNLFKNSSVGQSVFVPCVEQKVLDKLEDKLPKEIITPDDISECRDNLLKKCGWSAEWFARAQASLPWPCFEGKMKSQVDNDFKSLIKWIAVVKAPMDKGVAFPKVKLTSDSRVVPDCDADNFPDSKTAYHMMIFAKMLARQTDDPKTGVGAVIVRGKVPDIVSLGWNGFPSKALYGEFPRASDDDRALQKKFPYVIHAEQNALMVRNVKDLTDGILFVTKPPCDECAPMIKLSGVKTIVIGEKIEKSRGGELSYNLIKEYIKEGIMTCYQMEATKTKAKRLASDPETRKRLKSSCSNSNDV

SEQ ID NO: 114 - protein, 414 aa, synthetic construct
  REGION 1..414: note = pYY-BEM4.5; tr|A0A2G3K826|A0A2G3K826_9BURK polypeptide sequence
MTKIIDDVNTAAAAVLDQATAAANQTTFAVGGVMVNNQTGEVISAIHNNVIIPLSNNVSFTFDPTAHGERQLVYWYYANKEALKLPEPNQITVITSLDPCAMCTGALLTAGFNVGVVAIDTYAGINCAQNFQFATLPANLRTKAQKNFGYYASGAANFKPLTRSYVGGPSVAFKNGVVTPANLRDCGTVFTQSVDTVRNTSNSTGLAPSQMSNPAELPSNSAILQAYRAIYKKAFTIKIDNPRLPDAQILTELKAVLADAPNARNAVAFIDPFGNLVLCMADAFNTSPVHAAFMNVTQEYAKTRWDLMNKYAQASTTDNPALYLTHPKYGTFVYLYAPDPDDSITIMSLGAYGSTMEGPIPNMFPSNLQFYYPPRNGAQFSELVPVVNELPPFYTQNVNISLMQVPGVTQAPTK

SEQ ID NO: 115 - protein, 308 aa, synthetic construct
  REGION 1..308: note = pYY-BEM4.6; tr|K1ZCJ4|K1ZCJ4_9BACT polypeptide sequence
MSSRAKKNRSTNLKKSIGQKSIENKPTDQKKDQVLVAYVPVIHEGYRRFFRHFPAVKELWLISQELSHELRSLQKDIRALKASETKKLLQTWGQFQKIKLLTPSSLAILQKTTTQLVFPDEEISHHLVEKYFAQNRVLFASFFLRWDKKSSLKKHDLQEYSEISNKEFDQMMIAIAQQEADKSDDWWRQVGGLIFKDETILLLAHNQHTPTEAEAYFAGDPRADFHQGEYLKISTAIHAEAYLIAQAAKQGISLEGADLYVTTFPCPVCAKQVAYSGIKRVFFREGYSLLDGETILKANGVKLIRVTV

SEQ ID NO: 116 - protein, 615 aa, synthetic construct
  REGION 1..615: note = pYY-BEM4.7; tr|A0A1G3PNQ8|A0A1G3PNQ8_9SPIR polypeptide sequence
MRDLPLLVLGLTGPMGAGCTRFARDISKMEPGKVIKKQGLLDQVAHEISELSKKASEIRLQCISNGKNSELAELKRLNRRLNAKLAERACLHVIAKSSLPEPLFISLNTIVIKIAVDSITAPEFAEWAKNHAKVADLLKWLRTQWESELTLYETWGQDAGRFSQDELEKMDAMFAEFERIGDEILKEDFETYFGKRNNDFSIRMFSENIRLSGNPFRPAENGGGGGKYDEPSMVMIARETDRYIRFYRTRSDQKRSHFFIIDEIKNPREAEYFRARHQNFFLVSIFSSSEIRASRMRRGLGHDAGVSDADFQHLFRELDSRDWGADDFDAHGLHRQNIYRCFNLADIAINNDVEDERFSEVLFNKFIRYYALMLSPGCVQPTPQETYMHLAYSLSLRSTCISRQVGAVITDLEDRILSLGWNEVPEGQIGCGLKVKKDYTDKENPLFEMEIWDNVITAEDLAVWDDEDSICVKDILSRIEIKTKLKSVSLTPEERADVLKALRIKRLEYSRSLHAEENAILQVASRGGVGLKDGTIYVTTFPCELCSKKIYQVGISKIYYTEPYPNSISEKVILKDGIRNIKILQFEGVKSYSYFKLFKPGFDKKDAQMLEGRGI

SEQ ID NO: 117 - protein, 291 aa, synthetic construct
  REGION 1..291: note = pYY-BEM4.8; tr|A0A1G0PGF4|A0A1G0PGF4_9BACT polypeptide sequence
MKHNNQLRKEIEKLLGQNSIIKNDELKKLQKEYKIETDELLISFLPYAAEFAKVPISKYKVGAVVLGKSGNIYFGSNMEFEAGALSATVHAEQSAVNNAWLNGETGINKIAVTAAPCGYCRQFLNELTTAKQLHVLLKDKNLEAAKVFKLTELLPEAFGPRDLEIEGGLMKVENHKLKIENINDELINAALEAANKSYAPYSKNYSGVSIQLSDGTIFSGRYSENAAYNPSLLPFQSALAFMNMNTKKGSNNKIVDAVLVEAVSNISQKDAAGTLLNSISKTKLRYYKIKN

SEQ ID NO: 118 - protein, 398 aa, synthetic construct
  REGION 1..398: note = pYY-BEM4.9; tr|A0A0P4WGY5|A0A0P4WGY5_9EUCA polypeptide sequence
MEENSSATSQPKCASRTKQGGNDLSTDMSNLSVGETKRTDFLPWDDYFMAVAFLSAMRSKDPSSQVGACIVNADKKIVGIGYNGMPIGCSDDELPWNKESLDPLQTKYMYVCHAEMNAIMNKNSSDLAGCCVYVALFPCNECAKLVIQAGIREVVFFSDKHQQKPETVASKKMLNMAGVAYRQYTPSQSKIELNLSLKEQEKSEPTADITQSSERDQNSKRKDYLSWEEYFMAMAHLSALRSKDPITQVGACIVNSKKKIVGIGYNGMPLGCNDDLMPWGNSSSNKLETKYMYVCHAGVNAIMNKNSCDVSGCTLYVALFPCNECAKVIIQAGIKTIIYASDTNKDQASILASKKMLDMAGIKYRADNLSQRKIVIDFKTIDWNSRFMNDHQNDPTCL

SEQ ID NO: 119 - protein, 259 aa, synthetic construct
  REGION 1..259: note = pYY-BEM4.10; tr|A0A3D8IG27|A0A3D8IG27_9HELI polypeptide sequence
MRKNILYFILTLFFLSGLYATSLPEDNVVSGVIYEKIDTVSAEVDHIYPMLALAIVYKDWQEKNMLNKQGHNIGLVIVDENNMPVFWVRNSVHATHNGTQHGEVRLVSNLLNCEGFNKYLDKYTLYTTLEPCIMCAGMLSMVQIPKVVYAQKDLSCGNTQEIISTAKYPRYYKAFTVENGYKKDLEECFEQYKICKNDSITDFLVNDSAKEIFRKASNDLQDYKVKFKENRRVIKVAQEFLQNIQTKDNLDVLQCPKNM

SEQ ID NO: 120 - protein, 256 aa, synthetic construct
  REGION 1..256: note = pYY-BEM4.11; tr|A0A351C8C4|A0A351C8C4_9BACT polypeptide sequence
MNELTKQSEHLRNEALRIATRSYVPYTGQQEGVIILLENGDLIPGVRVENASFQLTIPALQNALSTMYALQRTDISMIVSSIPFTDSDLAYTGGMAEIAWEMVGASLLLVAGAHIPEAGTFIDPARGENLLDVSREAALNAFIPESDFPVGSAIQTSDDVVIDGCNVEHSDWSKIICAERNVLSTARSYGLGQITTIYVSCPKEPGGTPCGACRQVIVELAPDATVWMDRGNQEPIAMKATKLLPGHFTGNVLKKQ

SEQ ID NO: 121 - protein, 301 aa, synthetic construct
  REGION 1..301: note = pYY-BEM4.12; tr|A0A1G6V2K7|A0A1G6V2K7_PEPNI polypeptide sequence
MPIVRVNEIGARLPEDWEALETAIWQAYVSREDLPDAGELDLTLVDDATIQELNKTHRQLDKSTDVLSFPMYDDRDDLAADVQAGLPVILGDIMISVPTAERQAQAYGHSFKREMAYLLVHGLLHIAGYDHMSAEEKSAMRRAEEAILADVDVPRDTAPSKTAAVLDEADVQALIDAARAARLQAYAPYSGYAVGAALLAADGRRFCGVNVENASYGATCCAERTALFAAVTAGARDFIALALVTEGDEPAPPCGLCRQALAEFSPDLAIYLAGPTGETYRRTSLAALFPEAFSLSTKESV

SEQ ID NO: 122 - protein, 528 aa, synthetic construct
  REGION 1..528: note = pYY-BEM4.13; tr|F2NP91|F2NP91_MARHT polypeptide sequence
MPVMETHALEARFKEALARLCPEGRLLAAVSGGGDSVALLYLLKAAGRDTIVAHLDHALRPDSAADAAFVEKLAQRLGFPLETEHVDVRALAHRKRINLEAAAREVRYAFLARVARRWKARCILTAHTLDDNAETVLLQILRGAGRGLGIRPLQRRVARPLLEFSRAELRAYLEARGARWLEDPTNRSLELDRNYLRHAVLPRITARFPHALEALARFSQAQQADDWALEALSARHLIPDRRWPVPAYRALPLERAPEALRRRAIRGVLEALGVRPEARLVADVEAALGGRAQTLPGGVVVRRQRGTLFFIPPTVRFPKVQPPAGLEARPPRPGDYLVFPYGRKRLVDFLNERGVPRELKRRWPVGAVGAEVRWVYGLWPEPDEDRYMRRALVLARAAARQGEVPIGAVLVRDGAVLAEAANAVEASRDATAHAELLALRTALRRVGEKVLPGATLYVTLEPCPMCYGAILEARVARVVYGVENLKAGAFTVHGLEPRVALEAGRVEGECAKVLKDFFARLRPGRDGA

SEQ ID NO: 123 - protein, 226 aa, synthetic construct
  REGION 1..226: note = pYY-BEM4.14; tr|A0A316TX77|A0A316TX77_9BACT polypeptide sequence
MINGYTPYSGNQNTCYVKGESGTFYPGVRIENVSYPLTISSVQAAVCSCLANSDNPVEYYTGDHQPELLQVWADEYDMKPGGKLPDSPLKLFDPLVPSIPDIKKELDVLTEKSVTPNSGFPVSALLQTEKGYIRGVNIELSSWALGLCAERVAISRALTAGYTQFKSIHIYAPEADFVSPCGACRQVLLEVMPDADTELYHGDGTLSKHIVSDLLPFGFTSHKLKK

SEQ ID NO: 124 - protein, 321 aa, synthetic construct
  REGION 1..321: note = pYY-BEM4.15; tr|R6VYG3|R6VYG3_9FIRM polypeptide sequence
MIHKGTQTIETKRLILRAFTPDDAEAAFENWMSDPKVTEFLRWKTHADISDSRKIVNEWANGSADPEFYQWAIVPKDVNEPIGTISVVDRNDALGIFHIGYCIGSKWWHKGITSEAFSAVIHFLFEEVGANRIESQHDPENIHSGDVMKKCGLTFEGTLRQADFNNRGIVDACVYSILQSEWQNNTSVWQRLYNAALTVQNDRVVSPFIDAGGVAAALMTKKGNIYTGICIDTASTLGMCAERNAVANMLTNGESRIDKIVAVMPDGKVGAPCGACREYMMQLDRDSGDIEILLDLETEKTVRLKDLIPDWWGAERFGDTE

SEQ ID NO: 125 - protein, 229 aa, synthetic construct
  REGION 1..229: note = pYY-BEM4.16; tr|A0A3C1HZ18|A0A3C1HZ18_9BACI polypeptide sequence
MGDIMENWNELSEPWKRCFLQAWKAYCHGSIPIGAVLVDSEGEIFLEGRNRVHELTAPEGQLCDCRIAHAEMNVLVQVKTSDYEKLSGATIYSTMEPCIQCFGAIILSRIKNISFAAIDDKLAGATTLEDRHGFIKSRNLNIAGPFSHLGEIQIILRTDFLLRIFDSEYADPLIAAHEKDYPIGVALGRHYHRNNRLQVAKKETIPFGELFNEFSFDIKRAREGYTLGK

SEQ ID NO: 126 - protein, 205 aa, synthetic construct
  REGION 1..205: note = pYY-BEM4.17; tr|A0A1M6KV24|A0A1M6KV24_9BACT polypeptide sequence
MEASQQNILLKIEGKGPVAEINFTVTLPEWLVEQVQSGSTVFLTQKEKMRFVLELARKNVAQETGGPFAAAVFSLESGELVSAGVNVVVESRCSSAHAEVVALSLAQKAVDSHDLGAAGLPRMVLVSSAEPCAMCMGAIPWSGVKQVICGARDEDVRSVGFDEGAKPLEWVEDFAERGIEVIRDVLREEATEVLWDYRERGGEIY

SEQ ID NO: 127 - protein, 207 aa, synthetic construct
  REGION 1..207: note = pYY-BEM4.18; tr|A0A2U0T9B4|A0A2U0T9B4_9RHIZ polypeptide sequence
METAELISRLLDVIEKDIAPVTAKGVARGNKLFGAAILKKSDLAVIVAETNNEIENPLWHGEMQAIKRFFELPADQRPATRDCLFLATHEPCSLCLSGITWSGFDNFYYLFSHQDSRDGFAIPYDIQILKSVYAVPEPETGTVSPARDLYNRSNDFWTSHGLQDMIAGLARSNREALLARIDDLNALYAELSERYQRDKGGKGIPLP

SEQ ID NO: 128 - protein, 231 aa, synthetic construct
  REGION 1..231: note = pYY-BEM4.19; tr|A0A2K9PN08|A0A2K9PN08_9FLAO polypeptide sequence
MSDKKESKIKISKTSESIELDEIHSLLSYSIVQKFWENDDRNGRGYNVGVILVDENKNIVDWDINSVNKTENSTQHGEMRLISRYLDKDELYSLKGYTMYPTLEPCAMCAGMMTMTNVYRTVNGQMDYFYSKALERLSIDTRECGGYPPYPRTVISEISPSSISTRLDAEYKQYTNAGNKPIITKFLSTYKAKTIYDDAFNQFINFKCKFPENKTKYENAIKFYNSLPESI

SEQ ID NO: 129 - protein, 330 aa, synthetic construct
  REGION 1..330: note = pYY-BEM4.20; tr|F4PWM7|F4PWM7_CAVFA polypeptide sequence
MRFSLSLLFVILSVLLAGVLACKDPYNPETVDYGQCASATKANYEVRSDSKVLTPADLPADELAVHESRMRHIIDIARVNNKKFVSSIYFPNGTLACIGINTGKPNMIAHGEIVAIQNCTEIHGISMYTNYSIYTTGEPCSMCASAILWSRFKTVVWSTYNSDLYCKICMSNIPIDSSYIFSRAYGLGIEAPVAIGGVVKAEGDAWFGTYCNRPTSIYYIAPKCACQDPAKVSPLKFTQTRTTVWVEGGDKVVTQWNAIISNPSNSTIVDPPIVISPSVVFKGAPWGISAASEPNTYKLSYNKVLFPGQTFSFGYSVYGLEEVAFTALEA

SEQ ID NO: 130 - protein, 193 aa, synthetic construct
  REGION 1..193: note = pYY-BEM4.21; tr|U7QZM1|U7QZM1_PHOTE polypeptide sequence
MNKTRRKLLATLGIMSISMSFIAQAGEKKTQVINNILSKQEITEHEKYMREAIKEAIKNPKHPFGAVIVNRNNGEILSRGVNTGRNNPILHGEIQAINHYITQYGNQGWENVALYTTGEPCSMCMSALVWIGIREVIWATSISVIRNSGIRQIDISAHEIAERASSFYNPITLVGGILANETDKLFLERKRGN

SEQ ID NO: 131 - protein, 319 aa, synthetic construct
  REGION 1..319: note = pYY-BEM4.22; tr|A0A081CH48|A0A081CH48_PSEA2 polypeptide sequence
MASRRHLLATQVTGNHRKLSLWHLRGWLSPYTKLVDAVYFLTTNSFYHSLQTPPVQSITMLLSSIITSLALAAQASAYREGLHPEFQSGLSINSVPATDRDHWMRLANSAIYYPPVSHPCPQAPFGTAIVNTTSNELICAIANRVGSTGDPTQHGEITAIQHCTNVMRKKGLSPQEIIAAWKQLSLYTNAEPCTMCLSAIRWAGFKEVIYGTSVGTISENGRNQIYIPSNLVLEKSYSFGHATLMLGNILTHETDPFFQHQFNESAPCPVGCERTQVGEARVKTCEPVPNWQKLVRLEYSEDSRVGSEPVAHTPLHLEL

SEQ ID NO: 132 - protein, 203 aa, synthetic construct
  REGION 1..203: note = pYY-BEM4.23; tr|A0A3D3HMU1|A0A3D3HMU1_9GAMM polypeptide sequence
MDYSDAILGAITSIRRNSKQPGVNVTDNVTDSSTQYNNDEYWMRRALALAREAGEAGEIPVGAVLVKDNQQVAGGFNQPIRSHDPAAHAEILTLREAGAVLGNYRLIDTTLYVTLEPCMMCAGALVHSRIKRLVFGAAEPKTGAAGSFIDLLTLPRLNHYMEVTGGVLGEECSVLLSDFFRRRRAEKKALKRQNSESGSDSAS

SEQ ID NO: 133 - protein, 270 aa, synthetic construct
  REGION 1..270: note = pYY-BEM4.24; tr|A0A1N5WT13|A0A1N5WT13_9ACTN polypeptide sequence
MLEKIERRLVAAAEAVVRSPSTGDAHTVAAAAMDANGDIYSGVNVFHFTGGPCAELVVIGSAAAANAPPLITIVAVGDGDRGVIAPCGRCRQVMLDLHPDVFVIVPTGDGQLAAKPVRELLPFGYVARTGSTAPRVVYFHPRHYDTISSGLKTATVRFQDSVQTGPAVFVFDDGESIRRLDAVVEKVESRRLDHLTEEDAHHEALPDSDALRDAIKTQYPMLGDGDVVDVATFRLTAISAPDPDPRSSYPPAVSRCNPAGPRADLLVGQS

SEQ ID NO: 134 - protein, 257 aa, synthetic construct
  REGION 1..257: note = pYY-BEM4.25; tr|X0SAC5|X0SAC5_9ZZZZ polypeptide sequence
MTKDGRVIASAHDTEVTDQDSTAHAEINAIRKASKIYRKDLTGCLIISTHEPCPMCTGSIIWSNISKVVYGVSIRDSIKAGRDMINLSCKEIIKKPNAEINIYDGILKKECLKLYNNDTRKLVKKFRKYEWINIEENLLNKRMQWFENNKTMIRKLKGNDLEKAYHLILMKIGIKRSEAPIVKKSESKIIFHSKNYCPSLEACIILDLDTREVCKEIYERPTEELIRRLNSKLRFTRNYDCIRPYSDYCEEIIILEK

SEQ ID NO: 135 - protein, 154 aa, synthetic construct
  REGION 1..154: note = pYY-BEM4.26; tr|A0A3B8IC10|A0A3B8IC10_9BACT polypeptide sequence
MPSHEDFIHQCLELGKEALLQGNPPVGSVIVWQDQVIGRGIENGRSSGDITQHAELLALQEAVATGQRDKLKEAIIYSTHEPCVMCAYPIRQYKIPTVVYSVAVPELGGHTSSWHLLTTEDVPKWGKAPKIITGISAEEVEALNAAFQDSLKKG

SEQ ID NO: 136 - protein, 180 aa, synthetic construct
  REGION 1..180: note = pYY-BEM4.27; tr|A0A2N9P8B9|A0A2N9P8B9_9FLAO polypeptide sequence
MFIFKLISPPVSIEVYQDKIIQKLYICFMENIFTDEYFMKKALQEAETAFQQGEIPVGAVIVIDNRIIARSHNLTEMLNDVTAHAEMQAITASANFLGGKYLKDCTLYVTLEPCQMCAGALYWSQISKIVYGATDEQRGYRAMGAQLHPKTKVISGIMQNECTHLMKDFFKQRRSKSTKD

SEQ ID NO: 137 - protein, 178 aa, synthetic construct
  REGION 1..178: note = pYY-BEM4.28; tr|K1KX30|K1KX30_9BACT polypeptide sequence
MVKNPVNNNELYFGKHSEIPMNEEQKAYMKMAVDLSRSGMESGKGGPFGCVIVKDGKVIGIGSNSVLETNDPTAHAEIVAIRDACRNLGHFQLDGCEVYTSCEPCPMCLGAIYWARPSKVFFANDKRDAAEAGFDDDFIYQELELPYEKRKIPFEQGMQDTAKEVFQEWILKEDKTLY

SEQ ID NO: 138 - protein, 196 aa, synthetic construct
  REGION 1..196: note = pYY-BEM4.29; tr|R4XI84|R4XI84_TAPDE polypeptide sequence
MSSEIEPPSTDVHKHAVAEAADESGAADAFMQIALQQAETALLNKEVPVGCVFVHQPTGTVLATGANQTNASLNGTLHAEFVAIESILRDHPPSIFRESDLYVTVEPCVMCASALRQLQVRKVYFGCGNDRFGGCGSVFSIHSDASKTGDAAYMVESGIFRKEAIMLLRRFYLLQNESAPKPALKSTRVLKEHFDE

SEQ ID NO: 139 - protein, 212 aa, synthetic construct
  REGION 1..212: note = pYY-BEM4.30; tr|A0A239CVF7|A0A239CVF7_9DELT polypeptide sequence
MSPASKKHFPSLFSFLLLTIGLICGTAHAQPQGHTADDTAATLANASLKEHEPFIRRCYQLAIDAGKKGNHPFGALLVHKGKIVLEAENTVLTDNDFTNHAEMNLIAEAARTLSRQIIPEATVYTSCAPCAMCTATLAMAGFTRIVYGVSHDALNKRFGLKGKSVSCPALFKTMGMELEFVGPVLEKEGLRVFDFWPEKDPHAQMLKKQARK

SEQ ID NO: 140 - protein, 320 aa, synthetic construct
  REGION 1..320: note = pYY-BEM4.31; tr|A0A1Q3NME1|A0A1Q3NME1_9BACT polypeptide sequence
MTEFNYDWAKLAFSSKRPLTNLKATFIIAPREISEKRFTQLLKEYLPKGDILLGISKEDYVEGLEGQPQFAMLQQKTLQKLIDKVNDASAHKVYTLRYFQRELPAIIEKLTPPRVVGIHGSWHHSFHTLPIYYLLSEKRIPYQLVAAFSDEDEARAYEVATDKKIVRPTLEGSFDDTTVLQLTDEVAKSSYDYGFQTGAILAEKVNGVYQPVAAGFNKVVPYQTYALLNGASRETNFSPANDMNHYDTIHAEMQILVEAAKQGISLKDKTLFVNLMPCPSCARTLSQTELSEIVYRIDHSGGYAVDLLTKVGKDIRRIVY

SEQ ID NO: 141 - protein, 180 aa, synthetic construct
  REGION 1..180: note = pYY-BEM4.32; tr|A0A2G6N4N7|A0A2G6N4N7_9DELT polypeptide sequence
MKERTVSYSDRHFMAEALEMAESALTQGEFPVGCVIADGTAVVARGHRTGTTAGAVNEIDHAEINALRHLGLAGEHLDRTDLTIYSTMEPCLMCFAAIVLSGINRIVYAYEDVMGGGTGCDLTGLPPLYRDAPLTLVAGVRRRASLNLFRRFFTDPENGYWAGSLLSRYTLNQTKDSHRL

SEQ ID NO: 142 - protein, 156 aa, synthetic construct
  REGION 1..156: note = pYY-BEM4.33; tr|A0A0G0RBB8|A0A0G0RBB8_9BACT polypeptide sequence
MQSVQYNKLTHLQRRALDEAEQVLENSYNPYSHFYVGACLISEDEQLIAGTNFENAAYGSAICAERAAVLRANAMSIRRFRGIAIIARGEDFNTTEVTGPCGSCRQVLYEISQVSGCDLQVILATSKKDKIVITTIRELLPLAFGPLDLGVDIGKY

SEQ ID NO: 143 - protein, 217 aa, synthetic construct
  REGION 1..217: note = pYY-BEM4.34; tr|A0A327L2Q5|A0A327L2Q5_9RHIZ polypeptide sequence
MVTSRDGEDEAMMARCVALSRIAVGKGEYPFGAVVAREGRIVAEAINRTIRDGDVSRHAEVIALARAQKAIGRRELRECSLYSNVEPCAMCSYCIREAWVGRVVYALGSPVMGGVSKWNILRDDGLSGRMPQVFDAAPEVVSGVLVEQAQAAWRDWSPLAWEMITLRGLMTDPSARPECRTRAARPRSLWHHLVALIERPPRPYVDPTSAAEGHADL

SEQ ID NO: 144 - protein, 162 aa, synthetic construct
  REGION 1..162: note = pYY-BEM4.35; tr|S2DR30|S2DR30_9BACT polypeptide sequence
MKMKKKIEITVSLEVIQKSEWSKEDRSLIERAIHAVEHAHAPYSNFMVGTALLLDNGQIFSANNQENVSFPVGICAERAVLSYAMGNFPNNRPVKLAVVAKRRSDSTWATVTPCGLCRQTINEYEVKFGHPIEILMLNPGEEILKASGIDQLLPFRFNDLNS

SEQ ID NO: 145 - protein, 153 aa, synthetic construct
  REGION 1..153: note = pYY-BEM4.36; tr|A0A369QGF1|A0A369QGF1_9BACT polypeptide sequence
MEEHEKWMHWCLNLAQQALQQGDFPVGAVVVQKGKLIGQGVEAGQLKKDITCHAEMEAIRDARQTINTADLQNCILYSTHEPCIMCSYVIRHHKISRVVVGTTVPEVGGSSSAYPLLSAPDISIWVAPPHLVTGVLAEACQALSQAYKQKFKK

SEQ ID NO: 146 - protein, 159 aa, synthetic construct
  REGION 1..159: note = pYY-BEM4.37; tr|A0A1W6X4U4|A0A1W6X4U4_9RHIZ polypeptide sequence
MTNPSRQERWDRRFLELAKVFGTWSKDRSAGTGCVIVGPDRLLRASGYNGFARGIDDEVPERHERPAKYSWTEHAERNAIYNAAKLGISLDGCTAYVNWFPCIDCARAIVQAGIVRLVGLHPDHADQRWGSEFKFATEMLRESGIEIILYDIPELAARK

SEQ ID NO: 147 - protein, 490 aa, synthetic construct
  REGION 1..490: note = pYY-BEM4.38; tr|A0A238BW09|A0A238BW09_9BILA polypeptide sequence
MEEMARKIRTKAKKANSYCNTMTFLISKASIVLLKAECKRIELTVVIFRFLIKMNASEPNNELCDMTVIKSMLKITHVIFDLDGLLIDTEVVFSKVNQCLLSKYNKKFTPHLRGLVTGMPKKAAVTYILEHEKLSAKVDVDEYCKKYDEMAEEMLPKCSLMPGVMKLVRHLKTHSIPMAICTGATKKEFEIKTRYHKELLDLISLRVLSGDDPAVKRGKPAPDPFLVTMDRFKQKPEKAENVLVFEDAANGVCAAIAAGMNVIMVPDLTYMKIPEGLQNKINSFSDNLIISNDLNVALMSLKKELSEEEVHFLNRAFEIAVDAVLNNEVPVGCVFVFEGQEVAFGRNDVNRTKNPTYHAEMVALKMMKQWCMDNGRDLEEIMRRTTLYVTLEPCIMCASALYHLRLKKILYGAANERFGGLVSVGTREKYGAKHFIEIMPNLSVDRAVKLLKEFYEKQNPFCPEEKRKVKKPKKSGNNNDNSDDAVALNV

SEQ ID NO: 148 - protein, 159 aa, synthetic construct
  REGION 1..159: note = pYY-BEM4.39; tr|A0A1J5H6Z0|A0A1J5H6Z0_9BACT polypeptide sequence
MAYQPSEKFMQMAIDKTREGVLSGQTPFGACIVKDGKVVACEHNTVWQDTDITSHGEVHTIRAACKAIGSIDLSGCILYSTCEPCPMCFSAIHWARIDTVVYGAFIADAQDAGFNELTISNEKMKEFGGSPVNFISGFMRDENVALFKLWKEQGANNVY

SEQ ID NO: 149 - protein, 168 aa, synthetic construct
  REGION 1..168: note = pYY-BEM4.40; tr|A0A3C2D945|A0A3C2D945_9BACT polypeptide sequence
MKTTEIRIIVHEYQNIDELTENDQYLLHEARRITEFAYAPYSGFHVGAAILLGNGMIVKGNNQENSAYPSGLCAERVALFYANANYPDSEVKTIAISAAKNGILVNDPIKPCGGCRQTLSEAEVRFGSPIRIILDGQDSILVLHGVESLLPLSFSKKDLASPLAATGR

SEQ ID NO: 150 - protein, 214 aa, synthetic construct
  REGION 1..214: note = pYY-BEM4.41; tr|A0A1I7EYS3|A0A1I7EYS3_9BURK polypeptide sequence
MKFKLDPSRPPDEDDYYLGVALAVRRKANCTGNRVAAVIVKNKRVIATGYNGVPEDMPNCLDGGCLRCSNPGGQFKSGTRYDLCICVHAEQNALLTAARFGISVEGAHLYTTMQPCFGCAKEILQAKIEKVFYLHPWVPTDVDPVMDAAMKAEYAKIIGKLKVKKLDFDDPVATWAVTTMRQAALASDKNPDKKTPPKTAKKKVAKKKSRTSPR

SEQ ID NO: 151 - protein, 155 aa, synthetic construct
  REGION 1..155: note = pYY-BEM4.42; tr|H8GQX8|H8GQX8_METAL polypeptide sequence
MNHEHFMRRAIELARQAPQYPFGAVIVRRDDGQCVGQGFNRSDLNPTYHGEMVAINDCAVRHCAEDWRGFDLYTTAEPCAMCQGAIEWAGIGRVFYGTSIPYLQKLGWWQIDLRAAEVSARAVFRDTLIVGGILETECNALFAAARRGCFGTGSE

SEQ ID NO: 152 - protein, 156 aa, synthetic construct
  REGION 1..156: note = pYY-BEM4.43; tr|A0A0S8HZN3|A0A0S8HZN3_9CHLR polypeptide sequence
MDEHDIRFLRASFDVARNARKNGNHPFGALLVDEHGRIVMEAENTVITAKDCTGHAETNLMREASSKYDSDFLANCTIYTSTEPCPMCAGAIFWSNVRRVVYGLSEESLYEIAGRGSEEVLFLSCREIFERGKKLIEVIGPLLEDEAREVHMGFWR

SEQ ID NO: 153 - protein, 193 aa, synthetic construct
  REGION 1..193: note = pYY-BEM4.44; tr|E3SF31|E3SF31_9CAUD polypeptide sequence
MKPTTVLQIAYLVSQESKCCSWKVGAVIEKNGRIISTGYNGSPAGGVNCCEHAEEQGWLLNKPKPVLIPGHKSECVRFSQVDRFVLAKAHREAHSAWSKNNEIHAELNAILFAARMGSSIEGATMYVTLSPCPDCAKAISQSGIKKLVYCETYDKNIPGWDDILKNAGIEVFNVPKRSLDKLNWENINEFCGE

SEQ ID NO: 154 - protein, 330 aa, synthetic construct
  REGION 1..330: note = pYY-BEM4.45; tr|F8AAC6|F8AAC6_THEID polypeptide sequence
MIRAPWHEYFMLLAKIVALRSGCNSRPSGAVIVKNKRILATGYNGPMPGAWHCTDRGPGYCFRREKGIPDIDKYNFCRATHAEANAIAQAARFGISVEGASLYCTLAPCYVCLKLIASAGIKKVYYEHDYGSRDFERDQFWKEAIKEAGLEKFEQITVSQEVMEQLQEILPYPTSKRRLAPTEFLDEFEDGKKYGVPSIEVLFNKLNYLTRQALKDITFVIEKTTVTEEPEGISFYLSGKMVELSELINTVKKQINADQNFYFLAKHNAIEAKIEILREAENIRLKAFLNECPLESFKRIAESLDYILYQVSNSLSLPTRLELSVNLLRI

SEQ ID NO: 155 - protein, 158 aa, synthetic construct
  REGION 1..158: note = pYY-BEM4.46; tr|A0A2H4ZNK4|A0A2H4ZNK4_9EUKA polypeptide sequence
MKKQLSRKIQEEWMSRLLRNAYDAGTYGEVPIAAVILNESGQCIGWGRNCREKDQNPLGHAEIIALRQASYLKKSWRFNECTMLVTLEPCPMCAGALLQARINHIIYGASDYKRGGFGGVLDLSKNSSAHHKIEITRGVKSIQSCQLLETWFRRRRRV

SEQ ID NO: 156 - protein, 176 aa, synthetic construct
  REGION 1..176: note = pYY-BEM4.47; tr|A0A239N5N1|A0A239N5N1_9PSED polypeptide sequence
MEGRAGIIPFDEGGAAMGPAEEDSPMQHLAYMREALALARANVEAGGRPFGAVLVRDGEVIARAANGTHLDHDPTAHAELLALRAAGRALGSPRLDGCVVYASGHPCPMCLAAMHLSGVSAAYYAYSNADGEPYGLSTAAVYAQMAQPVEWQSLPLQALRPEDEEGLYGFWRERRP

SEQ ID NO: 157 - protein, 199 aa, synthetic construct
  REGION 1..199: note = pYY-BEM4.48; tr|A0A328VTR2|A0A328VTR2_9PSED polypeptide sequence
MHPEHLALLQQAPASTHADDTWARLCCEQALLAVEEGCYAVGALLVDGAGELLCSGRNQVFAPAYASAAHAEMRVLDQLEAEHAQVDRRSLTLYVSLEPCLMCYGRILLAGITRVRYLARDRDGGFALRHGRLPPAWANLASGLSVVQAKADPYWLDLAEHAIGRLQDRQTLRQRVIRAWRGQRTLTDEFSSTKRTHSG

SEQ ID NO: 158 - protein, 402 aa, synthetic construct
  REGION 1..402: note = pYY-BEM4.49; tr|A0A103YG48|A0A103YG48_CYNCS polypeptide sequence
YIRELHASSLRRDEHEIQNPKILVIVDRLSSPSLHVSLSLSLSLVIFPPFIPLNQTPTHMENAKVVEAKDGTIAVASAFSGHQEVVQDRDHKFLTRAVEEAYKGVECGDGGPFGAVVVHKDEVVASCHNMVLKHTDPTAHAEVTAIREACKKLNKIELSDCEIYASCEPCPMCFGAIHLSRIKRLIYGAKAEAAIAIGFDDFIADALRGTGFYQKAHLEIKQADGNGAMIAEQVFEKTKAKFAIDHKFLTRAVEEAYKGVECGDGRPFGALVVHKDEVVVSCHNMVLNYTDPTAHAEITAIREACKKLNRIELSDCEMYSSCEPCPMCFGAIQISRIKRLVYGAKAEASIASGIPIGDFISDALKGTGFHEKANFEIKQADGNGAMIAEQVFERTKAMFPKR

SEQ ID NO: 159 - protein, 195 aa, synthetic construct
  REGION 1..195: note = pYY-BEM4.50; tr|W5M1M8|W5M1M8_LEPOC polypeptide sequence
NSSTRESRVMAQMEINGGASPPKKPGKGQSAADQDMITGLINKALQAKEFAYCPYSNFRVGAALMTNDGRVFTGCNVENACYNLGVCAERTAILKAVSEGYESFRAIAVSSDLQDQFISPCGACRQVMREFGTGWDVFLTKVDGSYVRMTVDELLPMSFGPDDLKKKKVFSLQNGHEVSTQFYTHSPCEAGENNN

SEQ ID NO: 160 - protein, 134 aa, synthetic construct
  REGION 1..134: note = pYY-BEM4.51; tr|A0A3N5YPZ2|A0A3N5YPZ2_9ALTE polypeptide sequence
MSNSETEHIQALVDAAQAAQKQSYSPYSSFQVGAAIFADDGNTYSGCNIENVAYPLGQCAEATAIGMMIMQGAKRIEDIMIASPNDQVCPPCGGCRQKISEFGTAETKIHMVTRSGEVSTVTLGELLPLAFDSL

SEQ ID NO: 161 - protein, 162 aa, synthetic construct
  REGION 1..162: note = pYY-BEM4.52; tr|A0A2A9NC86|A0A2A9NC86_9AGAR polypeptide sequence
MTNSTLSNEDRTRLIQGAFQARKKTYSPYSNFPVGAALLTTDGRIIEGANIENASYGGTICAERTAIVKAVSDGYRHFAGIAVTTKMPTRVSPCGICRQVLREFCSLDMPVLLVPGDYPQRNPVDDDGADKPGVITEGGVRETTLGALLPDSFGPENLPPRA

SEQ ID NO: 162 - protein, 163 aa, synthetic construct
  REGION 1..163: note = pYY-BEM4.53; tr|A0A2D6RD43|A0A2D6RD43_9GAMM polypeptide sequence
MNIENLITENDETLIRRCIELAGESVKNGDKPFGALLAKDGNIIFESSNNAKTKVPYHAEILTLMDAQDKLNTTDLSDYALYSNCEPCPMCSFMIREYKLDKVVFSVHSPYMGGQSRWNILEDDVLTRFKPYFSKPPNVVGGVLESEGKRIFDKVGLWMFGKE

SEQ ID NO: 163 - protein, 204 aa, synthetic construct
  REGION 1..204: note = pYY-BEM4.54; tr|A0A0H3AVL6|A0A0H3AVL6_BRUO2 polypeptide sequence
MHAKGYSQQERRIIPFANRFRFRELCSNKSLHGLRAKFPEQYTKWDPMRKAASITKANSATPMDIALEEAHAAGERGEVPIGAVIVRDGEIIARAGNRTREFNDVTAHAEILTIRQAGEMLGSERLIDCDLYVTLEPCAMCAAAISFARIRRLYYGASDPKGGGIEHGGRFYTQPTCHHAPEIYPGFCEADARKILKDFFREKR

SEQ ID NO: 164 - protein, 165 aa, synthetic construct
  REGION 1..165: note = pYY-BEM4.55; tr|A0A242H531|A0A242H531_9ENTE polypeptide sequence
MFIVKNNIEVIQQQAELDAKFMKQALKLAKDASNNGNEPFGAVLVKNDKVILTGENQIHTESDPTYHAELGIIRDFCTSQKITDLSEYTLYTSCEPCCMCAGAMVWSNLDRMVYGLGHDELAEIAGFNIMIGSEEIFSKSPNRPEVAKGVLKEAAVPVYVDYFQR

SEQ ID NO: 165 - protein, 181 aa, synthetic construct
  REGION 1..181: note = pYY-BEM4.56; tr|A0A2R6XZE2|A0A2R6XZE2_9BACL polypeptide sequence
MSGRISWHEYFMAQAKLIALRATCTRLMVGAVIVRDRRVIAGGYNGSIAGDEHCIDVGCKVRDGHCIRTIHAEQNALMQCAKFGVSTDGAELYVTHFPCLNCTKLLIQAGIRHIYYEVPYRVDPYAIELLEKAGVGTTQITVDLNAYVQVMSKVSTDPALTYVPESKAQKDEYGQSVGKIV

SEQ ID NO: 166 - protein, 173 aa, synthetic construct
  REGION 1..173: note = pYY-BEM4.57; tr|A0A139SHT6|A0A139SHT6_9BACT polypeptide sequence
MSEANASSESLPSRNSPVELIAEAAGKFGRRPTWDEYFMATAVLISTRSSCERLNVGCVIVTAGESHKNRIVAAGYNGHLPGSPHTSRMRDGHEQATVHAEQNAISDAARRGSSVEGCTAYVTHYPCINCAKILASAGIAKICYRLDYHNDPLVKPMLAEAGIEIVQLGEAAS

SEQ ID NO: 167 - protein, 170 aa, synthetic construct
  REGION 1..170: note = pYY-BEM4.58; tr|A0A261DBH2|A0A261DBH2_9RICK polypeptide sequence
MVMKKKLITVKRSTEFNNFFMEEALKQAQFALDKNEIPVGAIIVNRITNKVIAKAHNIVEQTKNPVLHAEIVAINQSCQILSSKNLSDCDMYVTLEPCVMCSGAISFARIGRLFYAANDPKQGAIENGGRFFNSKSCFYRPEIYSGFSAKISENLIKEFFYNVRYQKCNP

SEQ ID NO: 168 - protein, 146 aa, synthetic construct
  REGION 1..146: note = pYY-BEM4.59; tr|A0A2N0XZK6|A0A2N0XZK6_9VIBR polypeptide sequence
MTDNSLHESYMRQAFELSKSALPGCRPNPPVGCVFVKDGEVVSSGFSQPPGNHHAEAGAIAAYTGSYDGLVAYVTLEPCSFQGRTPSCAKALVRVRPEKVYVAILDPDTRNSGAGIKILEDAGIDVEVGLLGEEVASFLNPYLIRN

SEQ ID NO: 169 - protein, 159 aa, synthetic construct
  REGION 1..159: note = pYY-BEM4.60; tr|A0A1V5R0F9|A0A1V5R0F9_9BACT polypeptide sequence
MTKKETTKLHALDDFCMKKALLLAKRAFRADEVPVGALVVDSSNKVIGRGYNQVEKRKSQRAHAEQLAIEQACKKIGDWRLEGCTLYVTLEPCTMCMGLIKLSRIERVVFGAASPLFGYQLDKNRKSQLYKKGVIKIRKGVGKATAAALLKDFFKNKRM

SEQ ID NO: 170 - protein, 167 aa, synthetic construct
  REGION 1..167: note = pYY-BEM4.61; tr|A0A2W0H8Y3|A0A2W0H8Y3_9BACI polypeptide sequence
MKNNGRLDHEYFMTEALQEAKEAGQRGDLPIGAVIVHNGRIIARGSNMRKTAGIKISHAENNAMHNCAPYLMKHASECVIYTTLEPCIMCLTTLVMANIDSIVFAADDKYMNMKPFIDANSYIRDRIHQYKGGVCRGESEALLRKYSPYAAELALNGTHPHHRKGGA

SEQ ID NO: 171 - protein, 165 aa, synthetic construct
  REGION 1..165: note = pYY-BEM4.62; tr|A0A261BDB7|A0A261BDB7_CAERE polypeptide sequence
LYKLYIFRMTTTKANLTQFEQELVDKAVGAMEKAYCKYSGFKVGAALVCEDGEIIIGANHENASYGATICAERSAMVTALTKGHRKFKLLAVATELEAPCSPCGICRQYLIEFGDYKVILGSSTSDQIIETTTYGLLPYAFTPKSLDDHEKEAEERNHQEGEKKH

SEQ ID NO: 172 - protein, 162 aa, synthetic construct
  REGION 1..162: note = pYY-BEM4.63; tr|A0A2E1PHI6|A0A2E1PHI6_9GAMM polypeptide sequence
MKELLIHSWLMLNSNSKLIMERVIELSEINLKNGKIPIAAVIVDKKNYEIISESQNEDSPIGHAELLAITKALKKLNTNRLDSTNLFVTIEPCPMCAYAISKCHINRLYFGSEDEKGGGVINGPRIFESHNLKKIDYVSHCYHEKTTQLMQSFFQLKRNQQL

SEQ ID NO: 173 - protein, 133 aa, synthetic construct
  REGION 1..133: note = pYY-BEM4.64; tr|A0A378LUA7|A0A378LUA7_9GAMM polypeptide sequence
MDTIIKKMISNAHNTLAHSYSPYSKFSVASCICTDKDNFYTGVNVENSAYGLAICAETSAISAMVTAGEKRIKSMVVMAGTNILCSPCGACRQRIYEFSTPDTLIHLCDKNSILRTFKINELLPEAFKFDFNP

SEQ ID NO: 174 - protein, 370 aa, synthetic construct
  REGION 1..370: note = pYY-BEM4.65; tr|A0A139HQ78|A0A139HQ78_9PEZI polypeptide sequence
MADSLKSKPGHARHDTALIHGLSQSDVQKLSESCVDAKSKAYCPYSHFRVGCAVLLANGDVVQGANVENAAYPVGTCAERVALGTAVGAKKGDFRALAVSTDISPPASPCGMCRQFIREFCELNTPILMYDKDGKSVVMTLEQLLPMSFGPDKLLPPGQLENGLMQTQTQSSFVTRAFSTTSSRRQDDTPQVPQSHYDFFPQTFPQGPPPKTSFSPDLKQLRKEFLQLQAKAHPDLAPQDQKRRAEALSMRINEAYKTLQSPLRRAQYLLSQQGIDVEDETAKLDDSSLLMEVMEAREAVEEVEDEEQLNEIRAENNGRIEESVRVLEDAFRDNEFEKAAQEAIRLRYWVNIEESIQGWEKGNGGGILHH

SEQ ID NO: 175 - protein, 165 aa, synthetic construct
  REGION 1..165: note = pYY-BEM4.66; tr|A0A2A9FXV0|A0A2A9FXV0_9VIBR polypeptide sequence
MCNLKENKDMDKYFHFACDATIEGMREGTGGPFGATLTRNGEVVCSVANTVLKDMDISGHAEMVAVREACKKLDTLDLSDCVMYATCEPCPMCVSVMLWAGIKTCYYASTHLDAAKHGFSDQQLRDYLDGSDTSTLNMVHIEDNRDDCAKIWTEFRHLNETKNDG

SEQ ID NO: 176 - protein, 509 aa, synthetic construct
  REGION 1..509: note = pYY-BEM4.67; tr|A0A1A8AG96|A0A1A8AG96_NOTFU polypeptide sequence
MEHSDRWSRAEPGLSTSSRETRDGSTQTDCKLQGHGPRLSKVNLFTLLSLWMELFPQEQDEENGQSQIRRSGLVVVREGKVVGLHCSGADLHAGQAAILQHGASLANCQLFFSRRPCATCLKMIINAGVRQITFWPGDPEISMLTSNQTHSQRTSQSITEASLDATAVEKLKSNSRPQICVLMQPLAPGVLQFVDETSRRSDFMERMMDDDPELDSEKLFNSDRLRHLKDFCRHFLIQTDQRHKDILSQMGLKNFCVEPYFSNLRSNMTELVEVLAAVAAGMPQQHYGFYREESLSLDPHPVDVSQAVARHCIVQARLLSYRTEDPKVGVGAVIWAKGQSACCCGTGRLYLIGCGYNAYPAGSKYAEYPQMDNKQEDRERRKYRYIVHAEQNALTFRTRDIKPDECSMLFVTKCPCDECIPLIRGAGVKHIYTSDQDRDKDKGDISYLRFGSLKGVCKFIWQRSPPVSSASSLHLTNGCVGKHVRQAEQQIYKNKKLCTKGSSGSSDIC

SEQ ID NO: 177 - protein, 148 aa, synthetic construct
  REGION 1..148: note = pYY-BEM4.68; tr|A0A3E2VN88|A0A3E2VN88_9FIRM polypeptide sequence
MEKEITNMDKQKLIQMAVDGLGRSYAPYSHFHVSAALLCADGTVYTGNNIENAAYTPSVCAERCAIFKAVGDGRREFEAIAVCGGPDGVIEDYCPPCGVCRQVMREFCDPSSFRVLVAKTAEDYREYTLEQLLPDGFGPDHLTGSGER

SEQ ID NO: 178 - protein, 221 aa, synthetic construct
  REGION 1..221: note = pYY-BEM4.69; tr|A0A2D5ZRJ2|A0A2D5ZRJ2_9BACT polypeptide sequence
MARPVHLHTGERRTEEGATESRAVAAVATAITRAPRAPPRPATGRERDGPPPRRVFGGGLRVGDPSGYDRGESKPIGGPLTEKRSDWHSYFMRIAGEVATRATCDRKHVGAVIVRNRTILSTGYNGSIRGMPHCDDVGHDMVDGHCIATIHAEANAILQAARNGVMIQDGSIYITASPCWNCFKLVANAGLKRVYYGEFYRDKRSFEVARRLGIDLMHIEV

SEQ ID NO: 179 - protein, 155 aa, synthetic construct
  REGION 1..155: note = pYY-BEM4.70; tr|A0A1B8WPS3|A0A1B8WPS3_9BACI polypeptide sequence
MEGVQLIYQFQWGNLIMTVNKEDLYLIDVARNTIKTLYVDGKHHVGAAVRTKTGKIYSAVHLEANIGRVSVCAEAIALGKAISEGESEFDTIVAVRHPDPTQENQKIEVVSPCGICRELISDYGKGTNVILKNKEGYIKTVISDLLPNKYIREDN

SEQ ID NO: 180 - protein, 156 aa, synthetic construct
  REGION 1..156: note = pYY-BEM4.71; tr|A0A1W5ZQK9|A0A1W5ZQK9_9BACI polypeptide sequence
MNRFMERAVSLAAENVRVGGQPFGAVLVKDDELVAEGVNEMHLNYDVSGHAELLAIRRAQGELQTHDLSGYTMYASGEPCPMCLSAMYFAGIKDVFYCATVEEAAQVGLEKSKNVYDDLQKSKGERSLVMKQMPLEDDQEDPMKLWDERTNHNGTS

SEQ ID NO: 181 - protein, 340 aa, synthetic construct
  REGION 1..340: note = pYY-BEM4.72; tr|A0A378V0W4|A0A378V0W4_MYCFO polypeptide sequence
MVHAQFDPTARQALAATAVEAKTRKDLTWQQIADAAELSPAFVTAAVLGQHALPARSAEAVAALLGLDDDAALLLQTIPIRGSIPGGIPTDPTIYRFYEMLQVYGTTLKALVHEQFGDGIISAINFKLDVRKVADPEGGERAVITLDGKYLPPNPFDRVRYRGGLMDFAQRTIDIARQNVAEGGRPFATVIVKNGEILAESPNLVAQTHDPTAHAEILAIRKACTRIGTEHLIGATIYVLAQPCPMCLGSLYYCSPDEVVFLTTRDAYEPHYVDDRKYFELNMFYDEFAKPWDQRRLPMRYEPRDAAVDVYKLWQERNGGERRVPGAPTSTRPGKNPRGE

SEQ ID NO: 182 - protein, 157 aa, synthetic construct
  REGION 1..157: note = pYY-BEM4.73; tr|I3XF03|I3XF03_RHIFR polypeptide sequence
MKQRCMSPKSAQRFWDNDMHNNKDRPMSENELFVAAREAMAKAHAPYSKFPVGAAIRAEDGQIYTGANIENLSFPEGWCAETTAISHMVMAGQRKIMEVAVIAEKLALCPPCGGCRQRLAEFSGASTRIYLCDETGIKKSLALSDLLPHSFETEILG

SEQ ID NO: 183 - protein, 595 aa, synthetic construct
  REGION 1..595: note = pYY-BEM4.74; tr|F8IEF3|F8IEF3_ALIAT polypeptide sequence
MDAKELETRGWLCMRAVDVIDKKRRGEALAEEELRFLIEGYVAGRIPDYQMSAFLMAVVWRGMTREETLVLTRLLADSGERLDLSGIPGVKVDKHSTGGVGDKATLVVLPLVASIGVPVIKMSGRGLGHTGGTIDKLESIPGFRTDLSVAELVAQVRQVGIALGGQTADLAPADKKLYALRDVTGTVESLPLIASSVMSKKLAGGADAIVLDVKVGDGAFMKSRSDARRLARLMVEIGEAAGRRTVAVLSNMDQPLGCAIGNALEVAEAIRVLSGEGPFDLAEIALALAEEMTVLAGVAATREEARRMLRQSVAEGRALETLRRWIAAQGGDPAVVDDPSRLPQAPVQMPYLPKKAGFVAKLSALAFGLAAMRLGAGRETKEEAIDPSVGIVLHAKVGDRVQTHRPMFTVHARTGEDALRCIQELEAAIQISDDPVEAPPLILARIDRSEALPYADLMDAAREARDRAYVPYSGFAVGAALELADGRMVTGANVENASYGLTNCAERSAVFRAVAEGGPGTKPEIRAVAVIADSPEPVSPCGACRQVLAEFCSPDTPVYLGNLQGDVRETTVGALLPGAFTDAQMANVRRQDKEA

SEQ ID NO: 184 - protein, 153 aa, synthetic construct
  REGION 1..153: note = pYY-BEM4.75; tr|A0A1G3M638|A0A1G3M638_9SPIR polypeptide sequence
MKTTNINALDKWDLRFLQMAEHVAEWSKDPSTKVGAVIVRPDRTIASVGFNGFARGVRDTVERLWNRELKYPLTVHAELNAILSAHEPVRGHSLYVSPLSPCSNCAGVIIQSGIARVVAKCGQVNNPAQWSESFNLALTAFAEAGVSVILVEH

SEQ ID NO: 185 - protein, 177 aa, synthetic construct
  REGION 1..177: note = pYY-BEM4.76; tr|A0A3D9LFR2|A0A3D9LFR2_9MICC polypeptide sequence
MEQNDHGSSGAFSDPFEDDIPLTASLPRITGTGSGIDWQRLESTARAAMTRAYVPYSRFPVGAAALVEDGRVVAGCNIENASLGLTLCAECSLVSNLQMSGGGRIVAFYCVDGNGEVLMPCGRCRQLLYEFHAPGMRLMGPDGELTMDEVLPLAFGPADMTHLSDSAASTDDPGRTR

SEQ ID NO: 186 - protein, 172 aa, synthetic construct
  REGION 1..172: note = pYY-BEM4.77; tr|A0A3B9YGB5|A0A3B9YGB5_9BACT polypeptide sequence
MAKPISKKYRKLIETAKAARKKAYSPYSRYQVGAAVLTESGRIYSGANMENASYGLCMCAERVAIANAVTRGEKVLQAVCVVGKKARPCGACRQVMLEFSTKETELLMVDIDPNARRDTVIRTRVYSMLPNPFDPFESGMLPQHPQNLLRRRKSPQPRRKRRSRPVHREVSR

SEQ ID NO: 187 - protein, 391 aa, synthetic construct
  REGION 1..391: note = pYY-BEM4.78; tr|A0A182F569|A0A182F569_ANOAL polypeptide sequence
MPRPSQFRVSSSQSLSNSQIQASQSSDSVVDITSYVNAVVKALLNLSCTKTIIKRADLVNIALKGNGRLIGRVLQDANIELKEIYGYELIEVEKSKTMILCSTLAAGSMDELNDANRRRYTFLYLILGYIFMKNGSVPETIVWEFLETLGIEEQQEHNYFGDVRKLYDSLFKQAYLTRTKQALEGLNDDVMLISWGVRSKHEVSKKDILAGFCKVMNRDPVDFKAQYIEANEKDDKMNNNINGTVDGRNTVEYSSLDASVKELIEAAIKVRNNAYCPYSNFAVGAALRTVGGDIVTGCNVENGTFGPSVCAERTAVCKAVSEGHREFTAVAVVAFQETEFTAPCGTCRQTLSEFSRKDIPIYLVKPSPVRVMVTSLFQLLPHAFSPSFLNK

SEQ ID NO: 188 - protein, 151 aa, synthetic construct
  REGION 1..151: note = pYY-BEM4.79; tr|A0A264Z0D4|A0A264Z0D4_9BACI polypeptide sequence
MEPKKLIEEAIVASKQAYVQYSNFHVGAALLTKDGKLYHGCNIENASYGLTNCAERTAIFKAVSEGEKEFQAIAVVGDTEGPISPCGACRQVLAEFFSPDTVVILANLKGDHVVTNINELLPGFFSSKDLQKKVKNCFEKNALGSSCLRPI

SEQ ID NO: 189 - protein, 229 aa, synthetic construct
  REGION 1..229: note = pYY-BEM4.80; tr|A0A1L9Q1R3|A0A1L9Q1R3_ASPVE polypeptide sequence
MPLSAEEAALVETATATINSIPLSEDYSVASAAKASDGRVFTGVNVYHFTGGPCAELVVLGVAAAAGAAQLTHIVAVANEQRGILSPCGRCRQVLLDLQPNIQVIVGKEGSEQSVPVAQLLPFSYRQPDQHTPVIFKALTSSGPVVVDFFATWCGPCKAVAPVVGKLSETYTDVRFIQVDVDKARSISQEHDIRAMPTFVLYKDGKLLDKRVVGGNMKELEEQIKAIIA

SEQ ID NO: 190 - protein, 18 aa, synthetic construct
  REGION 1..18: note = synthetic peptide
KRTADGSEFESPKKKRKV

SEQ ID NO: 191 - protein, 16 aa, synthetic construct
  REGION 1..16: note = synthetic peptide
KRPAATKKAGQAKKKK

SEQ ID NO: 192 - protein, 17 aa, synthetic construct
  REGION 1..17: note = synthetic peptide
KKTELQTTNAENKTKKL

SEQ ID NO: 193 - protein, 19 aa, synthetic construct
  REGION 1..19: note = synthetic peptide
KRGINDRNFWRGENGRKTR

SEQ ID NO: 194 - protein, 16 aa, synthetic construct
  REGION 1..16: note = synthetic peptide
RKSGKIAAIVVKRPRK

SEQ ID NO: 195 - protein, 7 aa, synthetic construct
  REGION 1..7: note = synthetic peptide
PKKKRKV

SEQ ID NO: 196 - protein, 30 aa, synthetic construct
  REGION 1..30: note = synthetic polypeptide
MDSLLMNRRKFLYQFKNVRWAKGRRETYLC

SEQ ID NO: 197 - protein, 1368 aa, Streptococcus pyogenes [sequence omitted]

SEQ ID NO: 198 - DNA, 4104 bp, Streptococcus pyogenes
  misc_feature 1..4104: note = wild type spCas9 polynucleotide sequence
  source 1..4104: mol_type = genomic DNA
atggataagaaatactcaataggcttagatatcggcacaaatagcgtcggatgggcggtgatcactgatgattataaggttccgtctaaaaagttcaaggttctgggaaatacagaccgccacagtatcaaaaaaaatcttataggggctcttttatttggcagtggagagacagcggaagcgactcgtctcaaacggacagctcgtagaaggtatacacgtcggaagaatcgtatttgttatctacaggagattttttcaaatgagatggcgaaagtagatgatagtttctttcatcgacttgaagagtcttttttggtggaagaagacaagaagcatgaacgtcatcctatttttggaaatatagtagatgaagttgcttatcatgagaaatatccaactatctatcatctgcgaaaaaaattggcagattctactgataaagcggatttgcgcttaatctatttggccttagcgcatatgattaagtttcgtggtcattttttgattgagggagatttaaatcctgataatagtgatgtggacaaactatttatccagttggtacaaatctacaatcaattatttgaagaaaaccctattaacgcaagtagagtagatgctaaagcgattctttctgcacgattgagtaaatcaagacgattagaaaatctcattgctcagctccccggtgagaagagaaatggcttgtttgggaatctcattgctttgtcattgggattgacccctaattttaaatcaaattttgatttggcagaagatgctaaattacagctttcaaaagatacttacgatgatgatttagataatttattggcgcaaattggagatcaatatgctgatttgtttttggcagctaagaatttatcagatgctattttactttcagatatcctaagagtaaatagtgaaataactaaggctcccctatcagcttcaatgattaagcgctacgatgaacatcatcaagacttgactcttttaaaagctttagttcgacaacaacttccagaaaagtataaagaaatcttttttgatcaatcaaaaaacggatatgcaggttatattgatgggggagctagccaagaagaattttataaatttatcaaaccaattttagaaaaaatggatggtactgaggaattattggtgaaactaaatcgtgaagatttgctgcgcaagcaacggacctttgacaacggctctattccccatcaaattcacttgggtgagctgcatgctattttgagaagacaagaagacttttatccatttttaaaagacaatcgtgagaagattgaaaaaatcttgacttttcgaattccttattatgttggtccattggcgcgtggcaatagtcgttttgcatggatgactcggaagtctgaagaaacaattaccccatggaattttgaagaagttgtcgataaaggtgcttcagctcaatcatttattgaacgcatgacaaactttgataaaaatcttccaaatgaaaaagtactaccaaaacatagtttgctttatgagtattttacggtttataacgaattgacaaaggtcaaatatgttactgagggaatgcgaaaaccagcatttctttcaggtgaacagaagaaagccattgttgatttactcttcaaaacaaatcgaaaagtaaccgttaagcaattaaaagaagattatttcaaaaaaatagaatgttttgatagtgttgaaatttcaggagttgaagatagatttaatgcttcattaggcgcctaccatgatttgctaaaaattattaaagataaagattttttggataatgaagaaaatgaagatatcttagaggatattgttttaacattgaccttatttgaagatagggggatgattgaggaaagacttaaaacatatgctcacctctttgatgataaggtgatgaaacagcttaaacgtcgccgttatactggttggggacgtttgtctcgaaaattgattaatggtattagggataagcaatctggcaaaacaatattagattttttgaaatcagatggttttgccaatcgcaattttatgcagctgatccatgatgatagtttgacatttaaagaagatattcaaaaagcacaggtgtctggacaaggccatagtttacatgaacagattgctaacttagctggcagtcctgctattaaaaaaggtattttacagactgtaaaaattgttgatgaactggtcaaagtaatggggcataagccagaaaatatcgttattgaaatggcacgtgaaaatcagacaactcaaaagggccagaaaaattcgcgagagcgtatgaaacgaatcgaagaaggtatcaaagaattaggaagtcagattcttaaagagcatcctgttgaaaatactcaattgcaaaatgaaaagctctatctctattatctacaaaatggaagagacatgtatgtggaccaagaattagatattaatcgtttaagtgattatgatgtcgatcacattgttccacaaagtttcattaaagacgattcaatagacaataaggtactaacgcgttctgataaaaatcgtggtaaatcggataacgttccaagtgaagaagtagtcaaaaagatgaaaaactattggagacaacttctaaacgccaagttaatcactcaacgtaagtttgataatttaacgaaagctgaacgtggaggtttgagtgaacttgataaagctggttttatcaaacgccaattggttgaaactcgccaaatcactaagcatgtggcacaaattttggatagtcgcatgaatactaaatacgatgaaaatgataaacttattcgagaggttaaagtgattaccttaaaatctaaattagtttctgacttccgaaaagatttccaattctataaagtacgtgagattaacaattaccatcatgcccatgatgcgtatctaaatgccgtcgttggaactgctttgattaagaaatatccaaaacttgaatcggagtttgtctatggtgattataaagtttatgatgttcgtaaaatgattgctaagtctgagcaagaaataggcaaagcaaccgcaaaatatttcttttactctaatatcatgaacttcttcaaaacagaaattacacttgcaaatggagagattcgcaaacgccctctaatcgaaactaatggggaaactggagaaattgtctgggataaagggcgagattttgccacagtgcgcaaagtattgtccatgccccaagtcaatattgtcaagaaaacagaagtacagacaggcggattctccaaggagtcaattttaccaaaaagaaattcggacaagcttattgctcgtaaaaaagactgggatccaaaaaaatatggtggttttgatagtccaacggtagcttattcagtcctagtggttgctaaggtggaaaaagggaaatcgaagaagttaaaatccgttaaagagttactagggatcacaattatggaaagaagttcctttgaaaaaaatccgattgactttttagaagctaaaggatataaggaagttaaaaaagacttaatcattaaactacctaaatatagtctttttgagttagaaaacggtcgtaaacggatgctggctagtgccggagaattacaaaaaggaaatgagctggctctgccaagcaaatatgtgaattttttatatttagctagtcattatgaaaagttgaagggtagtccagaagataacgaacaaaaacaattgtttgtggagcagcataagcattatttagatgagattattgagcaaatcagtgaattttctaagcgtgttattttagcagatgccaatttagataaagttcttagtgcatataacaaacatagagacaaaccaatacgtgaacaagcagaaaatattattcatttatttacgttgacgaatcttggagctcccgctgcttttaaatattttgatacaacaattgatcgtaaacgatatacgtctacaaaagaagttttagatgccactcttatccatcaatccatcactggtctttatgaaacacgcattgatttgagtcagctaggaggtgactga

SEQ ID NO: 199 - protein, 1367 aa, Streptococcus pyogenes
  REGION 1..1367: note = MISC_FEATURE - spCas9 polypeptide sequence
MDKKYSIGLDIGTNSVGWAVITDDYKVPSKKFKVLGNTDRHSIKKNLIGALLFGSGETAEATRLKRTARRRYTRRKNRICYLQEIFSNEMAKVDDSFFHRLEESFLVEEDKKHERHPIFGNIVDEVAYHEKYPTIYHLRKKLADSTDKADLRLIYLALAHMIKFRGHFLIEGDLNPDNSDVDKLFIQLVQIYNQLFEENPINASRVDAKAILSARLSKSRRLENLIAQLPGEKRNGLFGNLIALSLGLTPNFKSNFDLAEDAKLQLSKDTYDDDLDNLLAQIGDQYADLFLAAKNLSDAILLSDILRVNSEITKAPLSASMIKRYDEHHQDLTLLKALVRQQLPEKYKEIFFDQSKNGYAGYIDGGASQEEFYKFIKPILEKMDGTEELLVKLNREDLLRKQRTFDNGSIPHQIHLGELHAILRRQEDFYPFLKDNREKIEKILTFRIPYYVGPLARGNSRFAWMTRKSEETITPWNFEEVVDKGASAQSFIERMTNFDKNLPNEKVLPKHSLLYEYFTVYNELTKVKYVTEGMRKPAFLSGEQKKAIVDLLFKTNRKVTVKQLKEDYFKKIECFDSVEISGVEDRFNASLGAYHDLLKIIKDKDFLDNEENEDILEDIVLTLTLFEDRGMIEERLKTYAHLFDDKVMKQLKRRRYTGWGRLSRKLINGIRDKQSGKTILDFLKSDGFANRNFMQLIHDDSLTFKEDIQKAQVSGQGHSLHEQIANLAGSPAIKKGILQTVKIVDELVKVMGHKPENIVIEMARENQTTQKGQKNSRERMKRIEEGIKELGSQILKEHPVENTQLQNEKLYLYYLQNGRDMYVDQELDINRLSDYDVDHIVPQSFIKDDSIDNKVLTRSDKNRGKSDNVPSEEVVKKMKNYWRQLLNAKLITQRKFDNLTKAERGGLSELDKAGFIKRQLVETRQITKHVAQILDSRMNTKYDENDKLIREVKVITLKSKLVSDFRKDFQFYKVREINNYHHAHDAYLNAVVGTALIKKYPKLESEFVYGDYKVYDVRKMIAKSEQEIGKATAKYFFYSNIMNFFKTEITLANGEIRKRPLIETNGETGEIVWDKGRDFATVRKVLSMPQVNIVKKTEVQTGGFSKESILPKRNSDKLIARKKDWDPKKYGGFDSPTVAYSVLVVAKVEKGKSKKLKSVKELLGITIMERSSFEKNPIDFLEAKGYKEVKKDLIIKLPKYSLFELENGRKRMLASAGELQKGNELALPSKYVNFLYLASHYEKLKGSPEDNEQKQLFVEQHKHYLDEIIEQISEFSKRVILADANLDKVLSAYNKHRDKPIREQAENIIHLFTLTNLGAPAAFKYFDTTIDRKRYTSTKEVLDATLIHQSITGLYETRIDLSQLGGD

SEQ ID NO: 200 - DNA, 4212 bp, synthetic construct
  misc_feature 1..4212: note = wild-type Cas9 polynucleotide sequence
  misc_feature 5..58: note = RuvC domain
  misc_feature 718..764: note = RuvC domain
  misc_feature 772..901: note = HNH domain
  misc_feature 906..1101: note = RuvC domain
  source 1..4212: mol_type = other DNA
atggataaaaagtattctattggtttagacatcggcactaattccgttggatgggctgtcataaccgatgaatacaaagtaccttcaaagaaatttaaggtgttggggaacacagaccgtcattcgattaaaaagaatcttatcggtgccctcctattcgatagtggcgaaacggcagaggcgactcgcctgaaacgaaccgctcggagaaggtatacacgtcgcaagaaccgaatatgttacttacaagaaatttttagcaatgagatggccaaagttgacgattctttctttcaccgtttggaagagtccttccttgtcgaagaggacaagaaacatgaacggcaccccatctttggaaacatagtagatgaggtggcatatcatgaaaagtacccaacgatttatcacctcagaaaaaagctagttgactcaactgataaagcggacctgaggttaatctacttggctcttgcccatatgataaagttccgtgggcactttctcattgagggtgatctaaatccggacaactcggatgtcgacaaactgttcatccagttagtacaaacctataatcagttgtttgaagagaaccctataaatgcaagtggcgtggatgcgaaggctattcttagcgcccgcctctctaaatcccgacggctagaaaacctgatcgcacaattacccggagagaagaaaaatgggttgttcggtaaccttatagcgctctcactaggcctgacaccaaattttaagtcgaacttcgacttagctgaagatgccaaattgcagcttagtaaggacacgtacgatgacgatctcgacaatctactggcacaaattggagatcagtatgcggacttatttttggctgccaaaaaccttagcgatgcaatcctcctatctgacatactgagagttaatactgagattaccaaggcgccgttatccgcttcaatgatcaaaaggtacgatgaacatcaccaagacttgacacttctcaaggccctagtccgtcagcaactgcctgagaaatataaggaaatattctttgatcagtcgaaaaacgggtacgcaggttatattgacggcggagcgagtcaagaggaattctacaagtttatcaaacccatattagagaagatggatgggacggaagagttgcttgtaaaactcaatcgcgaagatctactgcgaaagcagcggactttcgacaacggtagcattccacatcaaatccacttaggcgaattgcatgctatacttagaaggcaggaggatttttatccgttcctcaaagacaatcgtgaaaagattgagaaaatcctaacctttcgcataccttactatgtgggacccctggcccgagggaactctcggttcgcatggatgacaagaaagtccgaagaaacgattactccatggaattttgaggaagttgtcgataaaggtgcgtcagctcaatcgttcatcgagaggatgaccaactttgacaagaatttaccgaacgaaaaagtattgcctaagcacagtttactttacgagtatttcacagtgtacaatgaactcacgaaagttaagtatgtcactgagggcatgcgtaaacccgcctttctaagcggagaacagaagaaagcaatagtagatctgttattcaagaccaaccgcaaagtgacagttaagcaattgaaagaggactactttaagaaaattgaatgcttcgattctgtcgagatctccggggtagaagatcgatttaatgcgtcacttggtacgtatcatgacctcctaaagataattaaagataaggacttcctggataacgaagagaatgaagatatcttagaagatatagtgttgactcttaccctctttgaagatcgggaaatgattgaggaaagactaaaaacatacgctcacctgttcgacgataaggttatgaaacagttaaagaggcgtcgctatacgggctggggacgattgtcgcggaaacttatcaacgggataagagacaagcaaagtggtaaaactattctcgattttctaaagagcgacggcttcgccaataggaactttatgcagctgatccatgatgactctttaaccttcaaagaggatatacaaaaggcacaggtttccggacaaggggactcattgcacgaacatattgcgaatcttgctggttcgccagccatcaaaaagggcatactccagacagtcaaagtagtggatgagctagttaaggtcatgggacgtcacaaaccggaaaacattgtaatcgagatggcacgcgaaaatcaaacgactcagaaggggcaaaaaaacagtcgagagcggatgaagagaatagaagagggtattaaagaactgggcagccagatcttaaaggagcatcctgtggaaaatacccaattgcagaacgagaaactttacctctattacctacaaaatggaagggacatgtatgttgatcaggaactggacataaaccgtttatctgattacgacgtcgatcacattgtaccccaatcctttttgaaggacgattcaatcgacaataaagtgcttacacgctcggataagaaccgagggaaaagtgacaatgttccaagcgaggaagtcgtaaagaaaatgaagaactattggcggcagctcctaaatgcgaaactgataacgcaaagaaagttcgataacttaactaaagctgagaggggtggcttgtctgaacttgacaaggccggatttattaaacgtcagctcgtggaaacccgccaaatcacaaagcatgttgcacagatactagattcccgaatgaatacgaaatacgacgagaacgataagctgattcgggaagtcaaagtaatcactttaaagtcaaaattggtgtcggacttcagaaaggattttcaattctataaagttagggagataaataactaccaccatgcgcacgacgcttatcttaatgccgtcgtagggaccgcactcattaagaaatacccgaagctagaaagtgagtttgtgtatggtgattacaaagtttatgacgtccgtaagatgatcgcgaaaagcgaacaggagataggcaaggctacagccaaatacttcttttattctaacattatgaatttctttaagacggaaatcactctggcaaacggagagatacgcaaacgacctttaattgaaaccaatggggagacaggtgaaatcgtatgggataagggccgggacttcgcgacggtgagaaaagttttgtccatgccccaagtcaacatagtaaagaaaactgaggtgcagaccggagggttttcaaaggaatcgattcttccaaaaaggaatagtgataagctcatcgctcgtaaaaaggactgggacccgaaaaagtacggtggcttcgatagccctacagttgcctattctgtcctagtagtggcaaaagttgagaagggaaaatccaagaaactgaagtcagtcaaagaattattggggataacgattatggagcgctcgtcttttgaaaagaaccccatcgacttccttgaggcgaaaggttacaaggaagtaaaaaaggatctcataattaaactaccaaagtatagtctgtttgagttagaaaatggccgaaaacggatgttggctagcgccggagagcttcaaaaggggaacgaactcgcactaccgtctaaatacgtgaatttcctgtatttagcgtcccattacgagaagttgaaaggttcacctgaagataacgaacagaagcaactttttgttgagcagcacaaacattatctcgacgaaatcatagagcaaatttcggaattcagtaagagagtcatcctagctgatgccaatctggacaaagtattaagcgcatacaacaagcacagggataaacccatacgtgagcaggcggaaaatattatccatttgtttactcttaccaacctcggcgctccagccgcattcaagtattttgacacaacgatagatcgcaaacgatacacttctaccaaggaggtgctagacgcgacactgattcaccaatccatcacgggattatatgaaactcggatagatttgtcacagcttgggggtgacggatcccccaagaagaagaggaaagtctcgagcgactacaaagaccatgacggtgattataaagatcatgacatcgattacaaggatgacgatgacaaggctgcagga

SEQ ID NO: 201 - protein, 1368 aa, synthetic construct
  REGION 1..1368: note = exemplary catalytically active Cas9 nickase (nCas9) polypeptide sequence
MDKKYSIGLAIGTNSVGWAVITDEYKVPSKKFKVLGNTDRHSIKKNLIGALLFDSGETAEATRLKRTARRRYTRRKNRICYLQEIFSNEMAKVDDSFFHRLEESFLVEEDKKHERHPIFGNIVDEVAYHEKYPTIYHLRKKLVDSTDKADLRLIYLALAHMIKFRGHFLIEGDLNPDNSDVDKLFIQLVQTYNQLFEENPINASGVDAKAILSARLSKSRRLENLIAQLPGEKKNGLFGNLIALSLGLTPNFKSNFDLAEDAKLQLSKDTYDDDLDNLLAQIGDQYADLFLAAKNLSDAILLSDILRVNTEITKAPLSASMIKRYDEHHQDLTLLKALVRQQLPEKYKEIFFDQSKNGYAGYIDGGASQEEFYKFIKPILEKMDGTEELLVKLNREDLLRKQRTFDNGSIPHQIHLGELHAILRRQEDFYPFLKDNREKIEKILTFRIPYYVGPLARGNSRFAWMTRKSEETITPWNFEEVVDKGASAQSFIERMTNFDKNLPNEKVLPKHSLLYEYFTVYNELTKVKYVTEGMRKPAFLSGEQKKAIVDLLFKTNRKVTVKQLKEDYFKKIECFDSVEISGVEDRFNASLGTYHDLLKIIKDKDFLDNEENEDILEDIVLTLTLFEDREMIEERLKTYAHLFDDKVMKQLKRRRYTGWGRLSRKLINGIRDKQSGKTILDFLKSDGFANRNFMQLIHDDSLTFKEDIQKAQVSGQGDSLHEHIANLAGSPAIKKGILQTVKVVDELVKVMGRHKPENIVIEMARENQTTQKGQKNSRERMKRIEEGIKELGSQILKEHPVENTQLQNEKLYLYYLQNGRDMYVDQELDINRLSDYDVDHIVPQSFLKDDSIDNKVLTRSDKNRGKSDNVPSEEVVKKMKNYWRQLLNAKLITQRKFDNLTKAERGGLSELDKAGFIKRQLVETRQITKHVAQILDSRMNTKYDENDKLIREVKVITLKSKLVSDFRKDFQFYKVREINNYHHAHDAYLNAVVGTALIKKYPKLESEFVYGDYKVYDVRKMIAKSEQEIGKATAKYFFYSNIMNFFKTEITLANGEIRKRPLIETNGETGEIVWDKGRDFATVRKVLSMPQVNIVKKTEVQTGGFSKESILPKRNSDKLIARKKDWDPKKYGGFDSPTVAYSVLVVAKVEKGKSKKLKSVKELLGITIMERSSFEKNPIDFLEAKGYKEVKKDLIIKLPKYSLFELENGRKRMLASAGELQKGNELALPSKYVNFLYLASHYEKLKGSPEDNEQKQLFVEQHKHYLDEIIEQISEFSKRVILADANLDKVLSAYNKHRDKPIREQAENIIHLFTLTNLGAPAAFKYFDTTIDRKRYTSTKEVLDATLIHQSITGLYETRIDLSQLGGD

SEQ ID NO: 202 - DNA, 4107 bp, Streptococcus pyogenes
  misc_feature 1..4107: note = Cas9 from Streptococcus pyogenes (NCBI Ref. Seq.: NC_002737.2)polynucleotide sequence
  source 1..4107: mol_type = genomic DNA
atggataagaaatactcaataggcttagatatcggcacaaatagcgtcggatgggcggtgatcactgatgaatataaggttccgtctaaaaagttcaaggttctgggaaatacagaccgccacagtatcaaaaaaaatcttataggggctcttttatttgacagtggagagacagcggaagcgactcgtctcaaacggacagctcgtagaaggtatacacgtcggaagaatcgtatttgttatctacaggagattttttcaaatgagatggcgaaagtagatgatagtttctttcatcgacttgaagagtcttttttggtggaagaagacaagaagcatgaacgtcatcctatttttggaaatatagtagatgaagttgcttatcatgagaaatatccaactatctatcatctgcgaaaaaaattggtagattctactgataaagcggatttgcgcttaatctatttggccttagcgcatatgattaagtttcgtggtcattttttgattgagggagatttaaatcctgataatagtgatgtggacaaactatttatccagttggtacaaacctacaatcaattatttgaagaaaaccctattaacgcaagtggagtagatgctaaagcgattctttctgcacgattgagtaaatcaagacgattagaaaatctcattgctcagctccccggtgagaagaaaaatggcttatttgggaatctcattgctttgtcattgggtttgacccctaattttaaatcaaattttgatttggcagaagatgctaaattacagctttcaaaagatacttacgatgatgatttagataatttattggcgcaaattggagatcaatatgctgatttgtttttggcagctaagaatttatcagatgctattttactttcagatatcctaagagtaaatactgaaataactaaggctcccctatcagcttcaatgattaaacgctacgatgaacatcatcaagacttgactcttttaaaagctttagttcgacaacaacttccagaaaagtataaagaaatcttttttgatcaatcaaaaaacggatatgcaggttatattgatgggggagctagccaagaagaattttataaatttatcaaaccaattttagaaaaaatggatggtactgaggaattattggtgaaactaaatcgtgaagatttgctgcgcaagcaacggacctttgacaacggctctattccccatcaaattcacttgggtgagctgcatgctattttgagaagacaagaagacttttatccatttttaaaagacaatcgtgagaagattgaaaaaatcttgacttttcgaattccttattatgttggtccattggcgcgtggcaatagtcgttttgcatggatgactcggaagtctgaagaaacaattaccccatggaattttgaagaagttgtcgataaaggtgcttcagctcaatcatttattgaacgcatgacaaactttgataaaaatcttccaaatgaaaaagtactaccaaaacatagtttgctttatgagtattttacggtttataacgaattgacaaaggtcaaatatgttactgaaggaatgcgaaaaccagcatttctttcaggtgaacagaagaaagccattgttgatttactcttcaaaacaaatcgaaaagtaaccgttaagcaattaaaagaagattatttcaaaaaaatagaatgttttgatagtgttgaaatttcaggagttgaagatagatttaatgcttcattaggtacctaccatgatttgctaaaaattattaaagataaagattttttggataatgaagaaaatgaagatatcttagaggatattgttttaacattgaccttatttgaagatagggagatgattgaggaaagacttaaaacatatgctcacctctttgatgataaggtgatgaaacagcttaaacgtcgccgttatactggttggggacgtttgtctcgaaaattgattaatggtattagggataagcaatctggcaaaacaatattagattttttgaaatcagatggttttgccaatcgcaattttatgcagctgatccatgatgatagtttgacatttaaagaagacattcaaaaagcacaagtgtctggacaaggcgatagtttacatgaacatattgcaaatttagctggtagccctgctattaaaaaaggtattttacagactgtaaaagttgttgatgaattggtcaaagtaatggggcggcataagccagaaaatatcgttattgaaatggcacgtgaaaatcagacaactcaaaagggccagaaaaattcgcgagagcgtatgaaacgaatcgaagaaggtatcaaagaattaggaagtcagattcttaaagagcatcctgttgaaaatactcaattgcaaaatgaaaagctctatctctattatctccaaaatggaagagacatgtatgtggaccaagaattagatattaatcgtttaagtgattatgatgtcgatcacattgttccacaaagtttccttaaagacgattcaatagacaataaggtcttaacgcgttctgataaaaatcgtggtaaatcggataacgttccaagtgaagaagtagtcaaaaagatgaaaaactattggagacaacttctaaacgccaagttaatcactcaacgtaagtttgataatttaacgaaagctgaacgtggaggtttgagtgaacttgataaagctggttttatcaaacgccaattggttgaaactcgccaaatcactaagcatgtggcacaaattttggatagtcgcatgaatactaaatacgatgaaaatgataaacttattcgagaggttaaagtgattaccttaaaatctaaattagtttctgacttccgaaaagatttccaattctataaagtacgtgagattaacaattaccatcatgcccatgatgcgtatctaaatgccgtcgttggaactgctttgattaagaaatatccaaaacttgaatcggagtttgtctatggtgattataaagtttatgatgttcgtaaaatgattgctaagtctgagcaagaaataggcaaagcaaccgcaaaatatttcttttactctaatatcatgaacttcttcaaaacagaaattacacttgcaaatggagagattcgcaaacgccctctaatcgaaactaatggggaaactggagaaattgtctgggataaagggcgagattttgccacagtgcgcaaagtattgtccatgccccaagtcaatattgtcaagaaaacagaagtacagacaggcggattctccaaggagtcaattttaccaaaaagaaattcggacaagcttattgctcgtaaaaaagactgggatccaaaaaaatatggtggttttgatagtccaacggtagcttattcagtcctagtggttgctaaggtggaaaaagggaaatcgaagaagttaaaatccgttaaagagttactagggatcacaattatggaaagaagttcctttgaaaaaaatccgattgactttttagaagctaaaggatataaggaagttaaaaaagacttaatcattaaactacctaaatatagtctttttgagttagaaaacggtcgtaaacggatgctggctagtgccggagaattacaaaaaggaaatgagctggctctgccaagcaaatatgtgaattttttatatttagctagtcattatgaaaagttgaagggtagtccagaagataacgaacaaaaacaattgtttgtggagcagcataagcattatttagatgagattattgagcaaatcagtgaattttctaagcgtgttattttagcagatgccaatttagataaagttcttagtgcatataacaaacatagagacaaaccaatacgtgaacaagcagaaaatattattcatttatttacgttgacgaatcttggagctcccgctgcttttaaatattttgatacaacaattgatcgtaaacgatatacgtctacaaaagaagttttagatgccactcttatccatcaatccatcactggtctttatgaaacacgcattgatttgagtcagctaggaggtgactga

SEQ ID NO: 203 - protein, 1368 aa, synthetic construct
  REGION 1..1368: note = catalytically inactive Cas9 (dCas9)polypeptide sequence
  REGION 5..58: note = MISC_FEATURE - RuvC domain
  REGION 718..764: note = MISC_FEATURE - RuvC domain
  REGION 773..902: note = MISC_FEATURE - HNH domain
  REGION 907..1102: note = MISC_FEATURE - RuvC domain
MDKKYSIGLAIGTNSVGWAVITDEYKVPSKKFKVLGNTDRHSIKKNLIGALLFDSGETAEATRLKRTARRRYTRRKNRICYLQEIFSNEMAKVDDSFFHRLEESFLVEEDKKHERHPIFGNIVDEVAYHEKYPTIYHLRKKLVDSTDKADLRLIYLALAHMIKFRGHFLIEGDLNPDNSDVDKLFIQLVQTYNQLFEENPINASGVDAKAILSARLSKSRRLENLIAQLPGEKKNGLFGNLIALSLGLTPNFKSNFDLAEDAKLQLSKDTYDDDLDNLLAQIGDQYADLFLAAKNLSDAILLSDILRVNTEITKAPLSASMIKRYDEHHQDLTLLKALVRQQLPEKYKEIFFDQSKNGYAGYIDGGASQEEFYKFIKPILEKMDGTEELLVKLNREDLLRKQRTFDNGSIPHQIHLGELHAILRRQEDFYPFLKDNREKIEKILTFRIPYYVGPLARGNSRFAWMTRKSEETITPWNFEEVVDKGASAQSFIERMTNFDKNLPNEKVLPKHSLLYEYFTVYNELTKVKYVTEGMRKPAFLSGEQKKAIVDLLFKTNRKVTVKQLKEDYFKKIECFDSVEISGVEDRFNASLGTYHDLLKIIKDKDFLDNEENEDILEDIVLTLTLFEDREMIEERLKTYAHLFDDKVMKQLKRRRYTGWGRLSRKLINGIRDKQSGKTILDFLKSDGFANRNFMQLIHDDSLTFKEDIQKAQVSGQGDSLHEHIANLAGSPAIKKGILQTVKVVDELVKVMGRHKPENIVIEMARENQTTQKGQKNSRERMKRIEEGIKELGSQILKEHPVENTQLQNEKLYLYYLQNGRDMYVDQELDINRLSDYDVDAIVPQSFLKDDSIDNKVLTRSDKNRGKSDNVPSEEVVKKMKNYWRQLLNAKLITQRKFDNLTKAERGGLSELDKAGFIKRQLVETRQITKHVAQILDSRMNTKYDENDKLIREVKVITLKSKLVSDFRKDFQFYKVREINNYHHAHDAYLNAVVGTALIKKYPKLESEFVYGDYKVYDVRKMIAKSEQEIGKATAKYFFYSNIMNFFKTEITLANGEIRKRPLIETNGETGEIVWDKGRDFATVRKVLSMPQVNIVKKTEVQTGGFSKESILPKRNSDKLIARKKDWDPKKYGGFDSPTVAYSVLVVAKVEKGKSKKLKSVKELLGITIMERSSFEKNPIDFLEAKGYKEVKKDLIIKLPKYSLFELENGRKRMLASAGELQKGNELALPSKYVNFLYLASHYEKLKGSPEDNEQKQLFVEQHKHYLDEIIEQISEFSKRVILADANLDKVLSAYNKHRDKPIREQAENIIHLFTLTNLGAPAAFKYFDTTIDRKRYTSTKEVLDATLIHQSITGLYETRIDLSQLGGD

SEQ ID NO: 204 - protein, 345 aa, Sulfolobus islandicus
  REGION 1..345: note = MISC_FEATURE - tr|F0NN87|F0NN87_SULIHCRISPR-associatedCasx protein OS =Sulfolobus islandicus (strain HVE10/4) GN = SiH_0402 PE=4; SV = 1);CasX polypeptide sequence
MEVPLYNIFGDNYIIQVATEAENSTIYNNKVEIDDEELRNVLNLAYKIAKNNEDAAAERRGKAKKKKGEEGETTTSNIILPLSGNDKNPWTETLKCYNFPTTVALSEVFKNFSQVKECEEVSAPSFVKPEFYEFGRSPGMVERTRRVKLEVEPHYLIIAAAGWVLTRLGKAKVSEGDYVGVNVFTPTRGILYSLIQNVNGIVPGIKPETAFGLWIARKVVSSVTNPNVSVVRIYTISDAVGQNPTTINGGFSIDLTKLLEKRYLLSERLEAIARNALSISSNMRERYIVLANYIYEYLTGSKRLEDLLYFANRDLIMNLNSDDGKVRDLKLISAYVNGELIRGEG

SEQ ID NO: 205 - protein, 345 aa, Sulfolobus islandicus
  REGION 1..345: note = MISC_FEATURE - tr|F0NH53|F0NH53_SULIR CRISPR associated protein, Casx OS =Sulfolobus islandicus (strain REY15A) GN=SiRe_0771 PE=4 SV=1);CasX polypeptide sequence
MEVPLYNIFGDNYIIQVATEAENSTIYNNKVEIDDEELRNVLNLAYKIAKNNEDAAAERRGKAKKKKGEEGETTTSNIILPLSGNDKNPWTETLKCYNFPTTVALSEVFKNFSQVKECEEVSAPSFVKPEFYKFGRSPGMVERTRRVKLEVEPHYLIMAAAGWVLTRLGKAKVSEGDYVGVNVFTPTRGILYSLIQNVNGIVPGIKPETAFGLWIARKVVSSVTNPNVSVVSIYTISDAVGQNPTTINGGFSIDLTKLLEKRDLLSERLEAIARNALSISSNMRERYIVLANYIYEYLTGSKRLEDLLYFANRDLIMNLNSDDGKVRDLKLISAYVNGELIRGEG

SEQ ID NO: 206 - protein, 987 aa, unidentified
  REGION 1..987: note = MISC_FEATURE - CasX polypeptide sequence
MEKRINKIRKKLSADNATKPVSRSGPMKTLLVRVMTDDLKKRLEKRRKKPEVMPQVISNNAANNLRMLLDDYTKMKEAILQVYWQEFKDDHVGLMCKFAQPASKKIDQNKLKPEMDEKGNLTTAGFACSQCGQPLFVYKLEQVSEKGKAYTNYFGRCNVAEHEKLILLAQLKPVKDSDEAVTYSLGKFGQRALDFYSIHVTKESTHPVKPLAQIAGNRYASGPVGKALSDACMGTIASFLSKYQDIIIEHQKVVKGNQKRLESLRELAGKENLEYPSVTLPPQPHTKEGVDFAYNEVIARVRMWVNLNLWQKLKLSRDDAKPLLRLKGFPSFPVVERRENEVDWWNTINEVKKLIDAKRDMGRVFWSGVTAEKRNTILEGYNYLPNENDHKKREGSLENPKKPAKRQFGDLLLYLEKKYAGDWGKVFDEAWERIDKKIAGLTSHIEREEARNAEDAQSKAVLTDWLRAKASFVLERLKEMDEKEFYACEIQLQKWYGDLRGNPFAVEAENRVVDISGFSIGSDGHSIQYRNLLAWKYLENGKREFYLLMNYGKKGRIRFTDGTDIKKSGKWQGLLYGGGKAKVIDLTFDPDDEQLIILPLAFGTRQGREFIWNDLLSLETGLIKLANGRVIEKTIYNKKIGRDEPALFVALTFERREVVDPSNIKPVNLIGVARGENIPAVIALTDPEGCPLPEFKDSSGGPTDILRIGEGYKEKQRAIQAAKEVEQRRAGGYSRKFASKSRNLADDMVRNSARDLFYHAVTHDAVLVFANLSRGFGRQGKRTFMTERQYTKMEDWLTAKLAYEGLTSKTYLSKTLAQYTSKTCSNCGFTITYADMDVMLVRLKKTSDGWATTLNNKELKAEYQITYYNRYKRQTVEKELSAELDRLSEESGNNDISKWTKGRRDEALFLLKKRFSHRPVQEQFVCLDCGHEVHAAEQAALNIARSWLFLNSNSTEFKSYKSGKQPFVGAWQAFYKRRLKEVWKPNA

SEQ ID NO: 207 - protein, 1210 aa, unidentified
  REGION 1..1210: note = MISC_FEATURE - APG80656.1 CRISPR-associated protein CasY [uncultured Parcubacteria group bacterium]; CasY polypeptide sequence
MSKRHPRISGVKGYRLHAQRLEYTGKSGAMRTIKYPLYSSPSGGRTVPREIVSAINDDYVGLYGLSNFDDLYNAEKRNEEKVYSVLDFWYDCVQYGAVFSYTAPGLLKNVAEVRGGSYELTKTLKGSHLYDELQIDKVIKFLNKKEISRANGSLDKLKKDIIDCFKAEYRERHKDQCNKLADDIKNAKKDAGASLGERQKKLFRDFFGISEQSENDKPSFTNPLNLTCCLLPFDTVNNNRNRGEVLFNKLKEYAQKLDKNEGSLEMWEYIGIGNSGTAFSNFLGEGFLGRLRENKITELKKAMMDITDAWRGQEQEEELEKRLRILAALTIKLREPKFDNHWGGYRSDINGKLSSWLQNYINQTVKIKEDLKGHKKDLKKAKEMINRFGESDTKEEAVVSSLLESIEKIVPDDSADDEKPDIPAIAIYRRFLSDGRLTLNRFVQREDVQEALIKERLEAEKKKKPKKRKKKSDAEDEKETIDFKELFPHLAKPLKLVPNFYGDSKRELYKKYKNAAIYTDALWKAVEKIYKSAFSSSLKNSFFDTDFDKDFFIKRLQKIFSVYRRFNTDKWKPIVKNSFAPYCDIVSLAENEVLYKPKQSRSRKSAAIDKNRVRLPSTENIAKAGIALARELSVAGFDWKDLLKKEEHEEYIDLIELHKTALALLLAVTETQLDISALDFVENGTVKDFMKTRDGNLVLEGRFLEMFSQSIVFSELRGLAGLMSRKEFITRSAIQTMNGKQAELLYIPHEFQSAKITTPKEMSRAFLDLAPAEFATSLEPESLSEKSLLKLKQMRYYPHYFGYELTRTGQGIDGGVAENALRLEKSPVKKREIKCKQYKTLGRGQNKIVLYVRSSYYQTQFLEWFLHRPKNVQTDVAVSGSFLIDEKKVKTRWNYDALTVALEPVSGSERVFVSQPFTIFPEKSAEEEGQRYLGIDIGEYGIAYTALEITGDSAKILDQNFISDPQLKTLREEVKGLKLDQRRGTFAMPSTKIARIRESLVHSLRNRIHHLALKHKAKIVYELEVSRFEEGKQKIKKVYATLKKADVYSEIDADKNLQTTVWGKLAVASEISASYTSQFCGACKKLWRAEMQVDETITTQELIGTVRVIKGGTLIDAIKDFMRPPIFDENDTPFPKYRDFCDKHHISKKMRGNSCLFICPFCRANADADIQASQTIALLRYVKEEKKVEDYFERFRKLKNIKVLGQMKKI

SEQ ID NO: 208 - protein, 1082 aa, Neisseria meningitidis
  REGION 1..1082: note = MISC_FEATURE - NCBI Reference: WP_002235162.1; type II CRISPR RNA-guided endonuclease Cas9; Nme1Cas9 polypeptide sequence
MAAFKPNPINYILGLDIGIASVGWAMVEIDEDENPICLIDLGVRVFERAEVPKTGDSLAMARRLARSVRRLTRRRAHRLLRARRLLKREGVLQAADFDENGLIKSLPNTPWQLRAAALDRKLTPLEWSAVLLHLIKHRGYLSQRKNEGETADKELGALLKGVADNAHALQTGDFRTPAELALNKFEKESGHIRNQRGDYSHTFSRKDLQAELILLFEKQKEFGNPHVSGGLKEGIETLLMTQRPALSGDAVQKMLGHCTFEPAEPKAAKNTYTAERFIWLTKLNNLRILEQGSERPLTDTERATLMDEPYRKSKLTYAQARKLLGLEDTAFFKGLRYGKDNAEASTLMEMKAYHAISRALEKEGLKDKKSPLNLSPELQDEIGTAFSLFKTDEDITGRLKDRIQPEILEALLKHISFDKFVQISLKALRRIVPLMEQGKRYDEACAEIYGDHYGKKNTEEKIYLPPIPADEIRNPVVLRALSQARKVINGVVRRYGSPARIHIETAREVGKSFKDRKEIEKRQEENRKDREKAAAKFREYFPNFVGEPKSKDILKLRLYEQQHGKCLYSGKEINLGRLNEKGYVEIDHALPFSRTWDDSFNNKVLVLGSENQNKGNQTPYEYFNGKDNSREWQEFKARVETSRFPRSKKQRILLQKFDEDGFKERNLNDTRYVNRFLCQFVADRMRLTGKGKKRVFASNGQITNLLRGFWGLRKVRAENDRHHALDAVVVACSTVAMQQKITRFVRYKEMNAFDGKTIDKETGEVLHQKTHFPQPWEFFAQEVMIRVFGKPDGKPEFEEADTPEKLRTLLAEKLSSRPEAVHEYVTPLFVSRAPNRKMSGQGHMETVKSAKRLDEGVSVLRVPLTQLKLKDLEKMVNREREPKLYEALKARLEAHKDDPAKAFAEPFYKYDKAGNRTQQVKAVRVEQVQKTGVWVRNHNGIADNATMVRVDVFEKGDKYYLVPIYSWQVAKGILPDRAVVQGKDEEDWQLIDDSFNFKFSLHPNDLVEVITKKARMFGYFASCHRGTGNINIRIHDLDHKIGKNGILEGIGVKTALSFQKYQIDELGKEIRPCRLKKRPPVR

SEQ ID NO: 209 - protein, 1082 aa, Neisseria meningitidis
  REGION 1..1082: note = MISC_FEATURE - NCBI Reference: WP_002230835; type II CRISPR RNA-guided endonuclease Cas9; Nme2Cas9 polypeptide sequence
MAAFKPNPINYILGLDIGIASVGWAMVEIDEEENPIRLIDLGVRVFERAEVPKTGDSLAMARRLARSVRRLTRRRAHRLLRARRLLKREGVLQAADFDENGLIKSLPNTPWQLRAAALDRKLTPLEWSAVLLHLIKHRGYLSQRKNEGETADKELGALLKGVANNAHALQTGDFRTPAELALNKFEKESGHIRNQRGDYSHTFSRKDLQAELILLFEKQKEFGNPHVSGGLKEGIETLLMTQRPALSGDAVQKMLGHCTFEPAEPKAAKNTYTAERFIWLTKLNNLRILEQGSERPLTDTERATLMDEPYRKSKLTYAQARKLLGLEDTAFFKGLRYGKDNAEASTLMEMKAYHAISRALEKEGLKDKKSPLNLSSELQDEIGTAFSLFKTDEDITGRLKDRVQPEILEALLKHISFDKFVQISLKALRRIVPLMEQGKRYDEACAEIYGDHYGKKNTEEKIYLPPIPADEIRNPVVLRALSQARKVINGVVRRYGSPARIHIETAREVGKSFKDRKEIEKRQEENRKDREKAAAKFREYFPNFVGEPKSKDILKLRLYEQQHGKCLYSGKEINLVRLNEKGYVEIDHALPFSRTWDDSFNNKVLVLGSENQNKGNQTPYEYFNGKDNSREWQEFKARVETSRFPRSKKQRILLQKFDEDGFKECNLNDTRYVNRFLCQFVADHILLTGKGKRRVFASNGQITNLLRGFWGLRKVRAENDRHHALDAVVVACSTVAMQQKITRFVRYKEMNAFDGKTIDKETGKVLHQKTHFPQPWEFFAQEVMIRVFGKPDGKPEFEEADTPEKLRTLLAEKLSSRPEAVHEYVTPLFVSRAPNRKMSGAHKDTLRSAKRFVKHNEKISVKRVWLTEIKLADLENMVNYKNGREIELYEALKARLEAYGGNAKQAFDPKDNPFYKKGGQLVKAVRVEKTQESGVLLNKKNAYTIADNGDMVRVDVFCKVDKKGKNQYFIVPIYAWQVAENILPDIDCKGYRIDDSYTFCFSLHKYDLIAFQKDEKSKVEFAYYINCDSSNGRFYLAWHDKGSKEQQFRISTQNLVLIQKYQVNELGKEIRPCRLKKRPPVR

SEQ ID NO: 210 - protein, 1300 aa, Francisella tularensis
  REGION 1..1300: note = MISC_FEATURE - wild type Cpf1 polypeptide sequence
  source 1..1300: note = subspecies novicida
MSIYQEFVNKYSLSKTLRFELIPQGKTLENIKARGLILDDEKRAKDYKKAKQIIDKYHQFFIEEILSSVCISEDLLQNYSDVYFKLKKSDDDNLQKDFKSAKDTIKKQISEYIKDSEKFKNLFNQNLIDAKKGQESDLILWLKQSKDNGIELFKANSDITDIDEALEIIKSFKGWTTYFKGFHENRKNVYSSNDIPTSIIYRIVDDNLPKFLENKAKYESLKDKAPEAINYEQIKKDLAEELTFDIDYKTSEVNQRVFSLDEVFEIANFNNYLNQSGITKFNTIIGGKFVNGENTKRKGINEYINLYSQQINDKTLKKYKMSVLFKQILSDTESKSFVIDKLEDDSDVVTTMQSFYEQIAAFKTVEEKSIKETLSLLFDDLKAQKLDLSKIYFKNDKSLTDLSQQVFDDYSVIGTAVLEYITQQIAPKNLDNPSKKEQELIAKKTEKAKYLSLETIKLALEEFNKHRDIDKQCRFEEILANFAAIPMIFDEIAQNKDNLAQISIKYQNQGKKDLLQASAEDDVKAIKDLLDQTNNLLHKLKIFHISQSEDKANILDKDEHFYLVFEECYFELANIVPLYNKIRNYITQKPYSDEKFKLNFENSTLANGWDKNKEPDNTAILFIKDDKYYLGVMNKKNNKIFDDKAIKENKGEGYKKIVYKLLPGANKMLPKVFFSAKSIKFYNPSEDILRIRNHSTHTKNGSPQKGYEKFEFNIEDCRKFIDFYKQSISKHPEWKDFGFRFSDTQRYNSIDEFYREVENQGYKLTFENISESYIDSVVNQGKLYLFQIYNKDFSAYSKGRPNLHTLYWKALFDERNLQDVVYKLNGEAELFYRKQSIPKKITHPAKEAIANKNKDNPKKESVFEYDLIKDKRFTEDKFFFHCPITINFKSSGANKFNDEINLLLKEKANDVHILSIDRGERHLAYYTLVDGKGNIIKQDTFNIIGNDRMKTNYHDKLAAIEKDRDSARKDWKKINNIKEMKEGYLSQVVHEIAKLVIEYNAIVVFEDLNFGFKRGRFKVEKQVYQKLEKMLIEKLNYLVFKDNEFDKTGGVLRAYQLTAPFETFKKMGKQTGIIYYVPAGFTSKICPVTGFVNQLYPKYESVSKSQEFFSKFDKICYNLDKGYFEFSFDYKNFGDKAAKGKWTIASFGSRLINFRNSDKNHNWDTREVYPTKELEKLLKDYSIEYGHGECIKAAICGESDKKFFAKLTSVLNTILQMRNSKTGTELDYLISPVADVNGNFFDSRQAPKNMPQDADANGAYHIGLKGLMLLGRIKNNQEGKKLNLVIKNEEYFEFVQNRNN

SEQ ID NO: 211 - protein, 1300 aa, Francisella tularensis
  REGION 1..1300: note = MISC_FEATURE - Cpf1 D917A polypeptide sequence
  source 1..1300: note = subspecies novicida
MSIYQEFVNKYSLSKTLRFELIPQGKTLENIKARGLILDDEKRAKDYKKAKQIIDKYHQFFIEEILSSVCISEDLLQNYSDVYFKLKKSDDDNLQKDFKSAKDTIKKQISEYIKDSEKFKNLFNQNLIDAKKGQESDLILWLKQSKDNGIELFKANSDITDIDEALEIIKSFKGWTTYFKGFHENRKNVYSSNDIPTSIIYRIVDDNLPKFLENKAKYESLKDKAPEAINYEQIKKDLAEELTFDIDYKTSEVNQRVFSLDEVFEIANFNNYLNQSGITKFNTIIGGKFVNGENTKRKGINEYINLYSQQINDKTLKKYKMSVLFKQILSDTESKSFVIDKLEDDSDVVTTMQSFYEQIAAFKTVEEKSIKETLSLLFDDLKAQKLDLSKIYFKNDKSLTDLSQQVFDDYSVIGTAVLEYITQQIAPKNLDNPSKKEQELIAKKTEKAKYLSLETIKLALEEFNKHRDIDKQCRFEEILANFAAIPMIFDEIAQNKDNLAQISIKYQNQGKKDLLQASAEDDVKAIKDLLDQTNNLLHKLKIFHISQSEDKANILDKDEHFYLVFEECYFELANIVPLYNKIRNYITQKPYSDEKFKLNFENSTLANGWDKNKEPDNTAILFIKDDKYYLGVMNKKNNKIFDDKAIKENKGEGYKKIVYKLLPGANKMLPKVFFSAKSIKFYNPSEDILRIRNHSTHTKNGSPQKGYEKFEFNIEDCRKFIDFYKQSISKHPEWKDFGFRFSDTQRYNSIDEFYREVENQGYKLTFENISESYIDSVVNQGKLYLFQIYNKDFSAYSKGRPNLHTLYWKALFDERNLQDVVYKLNGEAELFYRKQSIPKKITHPAKEAIANKNKDNPKKESVFEYDLIKDKRFTEDKFFFHCPITINFKSSGANKFNDEINLLLKEKANDVHILSIARGERHLAYYTLVDGKGNIIKQDTFNIIGNDRMKTNYHDKLAAIEKDRDSARKDWKKINNIKEMKEGYLSQVVHEIAKLVIEYNAIVVFEDLNFGFKRGRFKVEKQVYQKLEKMLIEKLNYLVFKDNEFDKTGGVLRAYQLTAPFETFKKMGKQTGIIYYVPAGFTSKICPVTGFVNQLYPKYESVSKSQEFFSKFDKICYNLDKGYFEFSFDYKNFGDKAAKGKWTIASFGSRLINFRNSDKNHNWDTREVYPTKELEKLLKDYSIEYGHGECIKAAICGESDKKFFAKLTSVLNTILQMRNSKTGTELDYLISPVADVNGNFFDSRQAPKNMPQDADANGAYHIGLKGLMLLGRIKNNQEGKKLNLVIKNEEYFEFVQNRNN

SEQ ID NO: 212 - protein, 1300 aa, Francisella tularensis
  REGION 1..1300: note = MISC_FEATURE - Cpf1 E1006A polypeptide sequence
  source 1..1300: note = subspecies novicida
MSIYQEFVNKYSLSKTLRFELIPQGKTLENIKARGLILDDEKRAKDYKKAKQIIDKYHQFFIEEILSSVCISEDLLQNYSDVYFKLKKSDDDNLQKDFKSAKDTIKKQISEYIKDSEKFKNLFNQNLIDAKKGQESDLILWLKQSKDNGIELFKANSDITDIDEALEIIKSFKGWTTYFKGFHENRKNVYSSNDIPTSIIYRIVDDNLPKFLENKAKYESLKDKAPEAINYEQIKKDLAEELTFDIDYKTSEVNQRVFSLDEVFEIANFNNYLNQSGITKFNTIIGGKFVNGENTKRKGINEYINLYSQQINDKTLKKYKMSVLFKQILSDTESKSFVIDKLEDDSDVVTTMQSFYEQIAAFKTVEEKSIKETLSLLFDDLKAQKLDLSKIYFKNDKSLTDLSQQVFDDYSVIGTAVLEYITQQIAPKNLDNPSKKEQELIAKKTEKAKYLSLETIKLALEEFNKHRDIDKQCRFEEILANFAAIPMIFDEIAQNKDNLAQISIKYQNQGKKDLLQASAEDDVKAIKDLLDQTNNLLHKLKIFHISQSEDKANILDKDEHFYLVFEECYFELANIVPLYNKIRNYITQKPYSDEKFKLNFENSTLANGWDKNKEPDNTAILFIKDDKYYLGVMNKKNNKIFDDKAIKENKGEGYKKIVYKLLPGANKMLPKVFFSAKSIKFYNPSEDILRIRNHSTHTKNGSPQKGYEKFEFNIEDCRKFIDFYKQSISKHPEWKDFGFRFSDTQRYNSIDEFYREVENQGYKLTFENISESYIDSVVNQGKLYLFQIYNKDFSAYSKGRPNLHTLYWKALFDERNLQDVVYKLNGEAELFYRKQSIPKKITHPAKEAIANKNKDNPKKESVFEYDLIKDKRFTEDKFFFHCPITINFKSSGANKFNDEINLLLKEKANDVHILSIDRGERHLAYYTLVDGKGNIIKQDTFNIIGNDRMKTNYHDKLAAIEKDRDSARKDWKKINNIKEMKEGYLSQVVHEIAKLVIEYNAIVVFADLNFGFKRGRFKVEKQVYQKLEKMLIEKLNYLVFKDNEFDKTGGVLRAYQLTAPFETFKKMGKQTGIIYYVPAGFTSKICPVTGFVNQLYPKYESVSKSQEFFSKFDKICYNLDKGYFEFSFDYKNFGDKAAKGKWTIASFGSRLINFRNSDKNHNWDTREVYPTKELEKLLKDYSIEYGHGECIKAAICGESDKKFFAKLTSVLNTILQMRNSKTGTELDYLISPVADVNGNFFDSRQAPKNMPQDADANGAYHIGLKGLMLLGRIKNNQEGKKLNLVIKNEEYFEFVQNRNN

SEQ ID NO: 213 - protein, 1300 aa, Francisella tularensis
  REGION 1..1300: note = MISC_FEATURE - Cpf1 D1255A polypeptide sequence
  source 1..1300: note = subspecies novicida
MSIYQEFVNKYSLSKTLRFELIPQGKTLENIKARGLILDDEKRAKDYKKAKQIIDKYHQFFIEEILSSVCISEDLLQNYSDVYFKLKKSDDDNLQKDFKSAKDTIKKQISEYIKDSEKFKNLFNQNLIDAKKGQESDLILWLKQSKDNGIELFKANSDITDIDEALEIIKSFKGWTTYFKGFHENRKNVYSSNDIPTSIIYRIVDDNLPKFLENKAKYESLKDKAPEAINYEQIKKDLAEELTFDIDYKTSEVNQRVFSLDEVFEIANFNNYLNQSGITKFNTIIGGKFVNGENTKRKGINEYINLYSQQINDKTLKKYKMSVLFKQILSDTESKSFVIDKLEDDSDVVTTMQSFYEQIAAFKTVEEKSIKETLSLLFDDLKAQKLDLSKIYFKNDKSLTDLSQQVFDDYSVIGTAVLEYITQQIAPKNLDNPSKKEQELIAKKTEKAKYLSLETIKLALEEFNKHRDIDKQCRFEEILANFAAIPMIFDEIAQNKDNLAQISIKYQNQGKKDLLQASAEDDVKAIKDLLDQTNNLLHKLKIFHISQSEDKANILDKDEHFYLVFEECYFELANIVPLYNKIRNYITQKPYSDEKFKLNFENSTLANGWDKNKEPDNTAILFIKDDKYYLGVMNKKNNKIFDDKAIKENKGEGYKKIVYKLLPGANKMLPKVFFSAKSIKFYNPSEDILRIRNHSTHTKNGSPQKGYEKFEFNIEDCRKFIDFYKQSISKHPEWKDFGFRFSDTQRYNSIDEFYREVENQGYKLTFENISESYIDSVVNQGKLYLFQIYNKDFSAYSKGRPNLHTLYWKALFDERNLQDVVYKLNGEAELFYRKQSIPKKITHPAKEAIANKNKDNPKKESVFEYDLIKDKRFTEDKFFFHCPITINFKSSGANKFNDEINLLLKEKANDVHILSIDRGERHLAYYTLVDGKGNIIKQDTFNIIGNDRMKTNYHDKLAAIEKDRDSARKDWKKINNIKEMKEGYLSQVVHEIAKLVIEYNAIVVFEDLNFGFKRGRFKVEKQVYQKLEKMLIEKLNYLVFKDNEFDKTGGVLRAYQLTAPFETFKKMGKQTGIIYYVPAGFTSKICPVTGFVNQLYPKYESVSKSQEFFSKFDKICYNLDKGYFEFSFDYKNFGDKAAKGKWTIASFGSRLINFRNSDKNHNWDTREVYPTKELEKLLKDYSIEYGHGECIKAAICGESDKKFFAKLTSVLNTILQMRNSKTGTELDYLISPVADVNGNFFDSRQAPKNMPQDAAANGAYHIGLKGLMLLGRIKNNQEGKKLNLVIKNEEYFEFVQNRNN

SEQ ID NO: 214 - protein, 1300 aa, Francisella tularensis
  REGION 1..1300: note = MISC_FEATURE - Cpf1 D917A/E1006A polypeptide sequence
  source 1..1300: note = subspecies novicida
MSIYQEFVNKYSLSKTLRFELIPQGKTLENIKARGLILDDEKRAKDYKKAKQIIDKYHQFFIEEILSSVCISEDLLQNYSDVYFKLKKSDDDNLQKDFKSAKDTIKKQISEYIKDSEKFKNLFNQNLIDAKKGQESDLILWLKQSKDNGIELFKANSDITDIDEALEIIKSFKGWTTYFKGFHENRKNVYSSNDIPTSIIYRIVDDNLPKFLENKAKYESLKDKAPEAINYEQIKKDLAEELTFDIDYKTSEVNQRVFSLDEVFEIANFNNYLNQSGITKFNTIIGGKFVNGENTKRKGINEYINLYSQQINDKTLKKYKMSVLFKQILSDTESKSFVIDKLEDDSDVVTTMQSFYEQIAAFKTVEEKSIKETLSLLFDDLKAQKLDLSKIYFKNDKSLTDLSQQVFDDYSVIGTAVLEYITQQIAPKNLDNPSKKEQELIAKKTEKAKYLSLETIKLALEEFNKHRDIDKQCRFEEILANFAAIPMIFDEIAQNKDNLAQISIKYQNQGKKDLLQASAEDDVKAIKDLLDQTNNLLHKLKIFHISQSEDKANILDKDEHFYLVFEECYFELANIVPLYNKIRNYITQKPYSDEKFKLNFENSTLANGWDKNKEPDNTAILFIKDDKYYLGVMNKKNNKIFDDKAIKENKGEGYKKIVYKLLPGANKMLPKVFFSAKSIKFYNPSEDILRIRNHSTHTKNGSPQKGYEKFEFNIEDCRKFIDFYKQSISKHPEWKDFGFRFSDTQRYNSIDEFYREVENQGYKLTFENISESYIDSVVNQGKLYLFQIYNKDFSAYSKGRPNLHTLYWKALFDERNLQDVVYKLNGEAELFYRKQSIPKKITHPAKEAIANKNKDNPKKESVFEYDLIKDKRFTEDKFFFHCPITINFKSSGANKFNDEINLLLKEKANDVHILSIARGERHLAYYTLVDGKGNIIKQDTFNIIGNDRMKTNYHDKLAAIEKDRDSARKDWKKINNIKEMKEGYLSQVVHEIAKLVIEYNAIVVFADLNFGFKRGRFKVEKQVYQKLEKMLIEKLNYLVFKDNEFDKTGGVLRAYQLTAPFETFKKMGKQTGIIYYVPAGFTSKICPVTGFVNQLYPKYESVSKSQEFFSKFDKICYNLDKGYFEFSFDYKNFGDKAAKGKWTIASFGSRLINFRNSDKNHNWDTREVYPTKELEKLLKDYSIEYGHGECIKAAICGESDKKFFAKLTSVLNTILQMRNSKTGTELDYLISPVADVNGNFFDSRQAPKNMPQDADANGAYHIGLKGLMLLGRIKNNQEGKKLNLVIKNEEYFEFVQNRNN

SEQ ID NO: 215 - protein, 1300 aa, Francisella tularensis
  REGION 1..1300: note = MISC_FEATURE - Cpf1 D917A/D1255A polypeptide sequence
  source 1..1300: note = subspecies novicida
MSIYQEFVNKYSLSKTLRFELIPQGKTLENIKARGLILDDEKRAKDYKKAKQIIDKYHQFFIEEILSSVCISEDLLQNYSDVYFKLKKSDDDNLQKDFKSAKDTIKKQISEYIKDSEKFKNLFNQNLIDAKKGQESDLILWLKQSKDNGIELFKANSDITDIDEALEIIKSFKGWTTYFKGFHENRKNVYSSNDIPTSIIYRIVDDNLPKFLENKAKYESLKDKAPEAINYEQIKKDLAEELTFDIDYKTSEVNQRVFSLDEVFEIANFNNYLNQSGITKFNTIIGGKFVNGENTKRKGINEYINLYSQQINDKTLKKYKMSVLFKQILSDTESKSFVIDKLEDDSDVVTTMQSFYEQIAAFKTVEEKSIKETLSLLFDDLKAQKLDLSKIYFKNDKSLTDLSQQVFDDYSVIGTAVLEYITQQIAPKNLDNPSKKEQELIAKKTEKAKYLSLETIKLALEEFNKHRDIDKQCRFEEILANFAAIPMIFDEIAQNKDNLAQISIKYQNQGKKDLLQASAEDDVKAIKDLLDQTNNLLHKLKIFHISQSEDKANILDKDEHFYLVFEECYFELANIVPLYNKIRNYITQKPYSDEKFKLNFENSTLANGWDKNKEPDNTAILFIKDDKYYLGVMNKKNNKIFDDKAIKENKGEGYKKIVYKLLPGANKMLPKVFFSAKSIKFYNPSEDILRIRNHSTHTKNGSPQKGYEKFEFNIEDCRKFIDFYKQSISKHPEWKDFGFRFSDTQRYNSIDEFYREVENQGYKLTFENISESYIDSVVNQGKLYLFQIYNKDFSAYSKGRPNLHTLYWKALFDERNLQDVVYKLNGEAELFYRKQSIPKKITHPAKEAIANKNKDNPKKESVFEYDLIKDKRFTEDKFFFHCPITINFKSSGANKFNDEINLLLKEKANDVHILSIARGERHLAYYTLVDGKGNIIKQDTFNIIGNDRMKTNYHDKLAAIEKDRDSARKDWKKINNIKEMKEGYLSQVVHEIAKLVIEYNAIVVFEDLNFGFKRGRFKVEKQVYQKLEKMLIEKLNYLVFKDNEFDKTGGVLRAYQLTAPFETFKKMGKQTGIIYYVPAGFTSKICPVTGFVNQLYPKYESVSKSQEFFSKFDKICYNLDKGYFEFSFDYKNFGDKAAKGKWTIASFGSRLINFRNSDKNHNWDTREVYPTKELEKLLKDYSIEYGHGECIKAAICGESDKKFFAKLTSVLNTILQMRNSKTGTELDYLISPVADVNGNFFDSRQAPKNMPQDAAANGAYHIGLKGLMLLGRIKNNQEGKKLNLVIKNEEYFEFVQNRNN

SEQ ID NO: 216 - protein, 1300 aa, Francisella tularensis
  REGION 1..1300: note = MISC_FEATURE - Cpf1 E1006A/D1255A polypeptide sequence
  source 1..1300: note = subspecies novicida
MSIYQEFVNKYSLSKTLRFELIPQGKTLENIKARGLILDDEKRAKDYKKAKQIIDKYHQFFIEEILSSVCISEDLLQNYSDVYFKLKKSDDDNLQKDFKSAKDTIKKQISEYIKDSEKFKNLFNQNLIDAKKGQESDLILWLKQSKDNGIELFKANSDITDIDEALEIIKSFKGWTTYFKGFHENRKNVYSSNDIPTSIIYRIVDDNLPKFLENKAKYESLKDKAPEAINYEQIKKDLAEELTFDIDYKTSEVNQRVFSLDEVFEIANFNNYLNQSGITKFNTIIGGKFVNGENTKRKGINEYINLYSQQINDKTLKKYKMSVLFKQILSDTESKSFVIDKLEDDSDVVTTMQSFYEQIAAFKTVEEKSIKETLSLLFDDLKAQKLDLSKIYFKNDKSLTDLSQQVFDDYSVIGTAVLEYITQQIAPKNLDNPSKKEQELIAKKTEKAKYLSLETIKLALEEFNKHRDIDKQCRFEEILANFAAIPMIFDEIAQNKDNLAQISIKYQNQGKKDLLQASAEDDVKAIKDLLDQTNNLLHKLKIFHISQSEDKANILDKDEHFYLVFEECYFELANIVPLYNKIRNYITQKPYSDEKFKLNFENSTLANGWDKNKEPDNTAILFIKDDKYYLGVMNKKNNKIFDDKAIKENKGEGYKKIVYKLLPGANKMLPKVFFSAKSIKFYNPSEDILRIRNHSTHTKNGSPQKGYEKFEFNIEDCRKFIDFYKQSISKHPEWKDFGFRFSDTQRYNSIDEFYREVENQGYKLTFENISESYIDSVVNQGKLYLFQIYNKDFSAYSKGRPNLHTLYWKALFDERNLQDVVYKLNGEAELFYRKQSIPKKITHPAKEAIANKNKDNPKKESVFEYDLIKDKRFTEDKFFFHCPITINFKSSGANKFNDEINLLLKEKANDVHILSIDRGERHLAYYTLVDGKGNIIKQDTFNIIGNDRMKTNYHDKLAAIEKDRDSARKDWKKINNIKEMKEGYLSQVVHEIAKLVIEYNAIVVFADLNFGFKRGRFKVEKQVYQKLEKMLIEKLNYLVFKDNEFDKTGGVLRAYQLTAPFETFKKMGKQTGIIYYVPAGFTSKICPVTGFVNQLYPKYESVSKSQEFFSKFDKICYNLDKGYFEFSFDYKNFGDKAAKGKWTIASFGSRLINFRNSDKNHNWDTREVYPTKELEKLLKDYSIEYGHGECIKAAICGESDKKFFAKLTSVLNTILQMRNSKTGTELDYLISPVADVNGNFFDSRQAPKNMPQDAAANGAYHIGLKGLMLLGRIKNNQEGKKLNLVIKNEEYFEFVQNRNN

SEQ ID NO: 217 - protein, 1300 aa, Francisella tularensis
  REGION 1..1300: note = MISC_FEATURE - Cpf1 D917A/E1006A/D1255A polypeptide sequence
  source 1..1300: note = subspecies novicida
MSIYQEFVNKYSLSKTLRFELIPQGKTLENIKARGLILDDEKRAKDYKKAKQIIDKYHQFFIEEILSSVCISEDLLQNYSDVYFKLKKSDDDNLQKDFKSAKDTIKKQISEYIKDSEKFKNLFNQNLIDAKKGQESDLILWLKQSKDNGIELFKANSDITDIDEALEIIKSFKGWTTYFKGFHENRKNVYSSNDIPTSIIYRIVDDNLPKFLENKAKYESLKDKAPEAINYEQIKKDLAEELTFDIDYKTSEVNQRVFSLDEVFEIANFNNYLNQSGITKFNTIIGGKFVNGENTKRKGINEYINLYSQQINDKTLKKYKMSVLFKQILSDTESKSFVIDKLEDDSDVVTTMQSFYEQIAAFKTVEEKSIKETLSLLFDDLKAQKLDLSKIYFKNDKSLTDLSQQVFDDYSVIGTAVLEYITQQIAPKNLDNPSKKEQELIAKKTEKAKYLSLETIKLALEEFNKHRDIDKQCRFEEILANFAAIPMIFDEIAQNKDNLAQISIKYQNQGKKDLLQASAEDDVKAIKDLLDQTNNLLHKLKIFHISQSEDKANILDKDEHFYLVFEECYFELANIVPLYNKIRNYITQKPYSDEKFKLNFENSTLANGWDKNKEPDNTAILFIKDDKYYLGVMNKKNNKIFDDKAIKENKGEGYKKIVYKLLPGANKMLPKVFFSAKSIKFYNPSEDILRIRNHSTHTKNGSPQKGYEKFEFNIEDCRKFIDFYKQSISKHPEWKDFGFRFSDTQRYNSIDEFYREVENQGYKLTFENISESYIDSVVNQGKLYLFQIYNKDFSAYSKGRPNLHTLYWKALFDERNLQDVVYKLNGEAELFYRKQSIPKKITHPAKEAIANKNKDNPKKESVFEYDLIKDKRFTEDKFFFHCPITINFKSSGANKFNDEINLLLKEKANDVHILSIARGERHLAYYTLVDGKGNIIKQDTFNIIGNDRMKTNYHDKLAAIEKDRDSARKDWKKINNIKEMKEGYLSQVVHEIAKLVIEYNAIVVFADLNFGFKRGRFKVEKQVYQKLEKMLIEKLNYLVFKDNEFDKTGGVLRAYQLTAPFETFKKMGKQTGIIYYVPAGFTSKICPVTGFVNQLYPKYESVSKSQEFFSKFDKICYNLDKGYFEFSFDYKNFGDKAAKGKWTIASFGSRLINFRNSDKNHNWDTREVYPTKELEKLLKDYSIEYGHGECIKAAICGESDKKFFAKLTSVLNTILQMRNSKTGTELDYLISPVADVNGNFFDSRQAPKNMPQDAAANGAYHIGLKGLMLLGRIKNNQEGKKLNLVIKNEEYFEFVQNRNN

SEQ ID NO: 218 - protein, 1052 aa, Staphylococcus aureus
  REGION 1..1052: note = MISC_FEATURE - Exemplary SaCas9 polypeptide sequence
KRNYILGLDIGITSVGYGIIDYETRDVIDAGVRLFKEANVENNEGRRSKRGARRLKRRRRHRIQRVKKLLFDYNLLTDHSELSGINPYEARVKGLSQKLSEEEFSAALLHLAKRRGVHNVNEVEEDTGNELSTKEQISRNSKALEEKYVAELQLERLKKDGEVRGSINRFKTSDYVKEAKQLLKVQKAYHQLDQSFIDTYIDLLETRRTYYEGPGEGSPFGWKDIKEWYEMLMGHCTYFPEELRSVKYAYNADLYNALNDLNNLVITRDENEKLEYYEKFQIIENVFKQKKKPTLKQIAKEILVNEEDIKGYRVTSTGKPEFTNLKVYHDIKDITARKEIIENAELLDQIAKILTIYQSSEDIQEELTNLNSELTQEEIEQISNLKGYTGTHNLSLKAINLILDELWHTNDNQIAIFNRLKLVPKKVDLSQQKEIPTTLVDDFILSPVVKRSFIQSIKVINAIIKKYGLPNDIIIELAREKNSKDAQKMINEMQKRNRQTNERIEEIIRTTGKENAKYLIEKIKLHDMQEGKCLYSLEAIPLEDLLNNPFNYEVDHIIPRSVSFDNSFNNKVLVKQEENSKKGNRTPFQYLSSSDSKISYETFKKHILNLAKGKGRISKTKKEYLLEERDINRFSVQKDFINRNLVDTRYATRGLMNLLRSYFRVNNLDVKVKSINGGFTSFLRRKWKFKKERNKGYKHHAEDALIIANADFIFKEWKKLDKAKKVMENQMFEEKQAESMPEIETEQEYKEIFITPHQIKHIKDFKDYKYSHRVDKKPNRELINDTLYSTRKDDKGNTLIVNNLNGLYDKDNDKLKKLINKSPEKLLMYHHDPQTYQKLKLIMEQYGDEKNPLYKYYEETGNYLTKYSKKDNGPVIKKIKYYGNKLNAHLDITDDYPNSRNKVVKLSLKPYRFDVYLDNGVYKFVTVKNLDVIKKENYYEVNSKCYEEAKKLKKISNQAEFIASFYNNDLIKINGELYRVIGVNNDLLNRIEVNMIDITYREYLENMNDKRPPRIIKTIASKTQSIKKYSTDILGNLYEVKSKKHPQIIKKG

SEQ ID NO: 219 - protein, 1052 aa, Staphylococcus aureus
  REGION 1..1052: note = MISC_FEATURE - SaCas9n polypeptide sequence
KRNYILGLDIGITSVGYGIIDYETRDVIDAGVRLFKEANVENNEGRRSKRGARRLKRRRRHRIQRVKKLLFDYNLLTDHSELSGINPYEARVKGLSQKLSEEEFSAALLHLAKRRGVHNVNEVEEDTGNELSTKEQISRNSKALEEKYVAELQLERLKKDGEVRGSINRFKTSDYVKEAKQLLKVQKAYHQLDQSFIDTYIDLLETRRTYYEGPGEGSPFGWKDIKEWYEMLMGHCTYFPEELRSVKYAYNADLYNALNDLNNLVITRDENEKLEYYEKFQIIENVFKQKKKPTLKQIAKEILVNEEDIKGYRVTSTGKPEFTNLKVYHDIKDITARKEIIENAELLDQIAKILTIYQSSEDIQEELTNLNSELTQEEIEQISNLKGYTGTHNLSLKAINLILDELWHTNDNQIAIFNRLKLVPKKVDLSQQKEIPTTLVDDFILSPVVKRSFIQSIKVINAIIKKYGLPNDIIIELAREKNSKDAQKMINEMQKRNRQTNERIEEIIRTTGKENAKYLIEKIKLHDMQEGKCLYSLEAIPLEDLLNNPFNYEVDHIIPRSVSFDNSFNNKVLVKQEEASKKGNRTPFQYLSSSDSKISYETFKKHILNLAKGKGRISKTKKEYLLEERDINRFSVQKDFINRNLVDTRYATRGLMNLLRSYFRVNNLDVKVKSINGGFTSFLRRKWKFKKERNKGYKHHAEDALIIANADFIFKEWKKLDKAKKVMENQMFEEKQAESMPEIETEQEYKEIFITPHQIKHIKDFKDYKYSHRVDKKPNRELINDTLYSTRKDDKGNTLIVNNLNGLYDKDNDKLKKLINKSPEKLLMYHHDPQTYQKLKLIMEQYGDEKNPLYKYYEETGNYLTKYSKKDNGPVIKKIKYYGNKLNAHLDITDDYPNSRNKVVKLSLKPYRFDVYLDNGVYKFVTVKNLDVIKKENYYEVNSKCYEEAKKLKKISNQAEFIASFYNNDLIKINGELYRVIGVNNDLLNRIEVNMIDITYREYLENMNDKRPPRIIKTIASKTQSIKKYSTDILGNLYEVKSKKHPQIIKKG

SEQ ID NO: 220 - protein, 1052 aa, Staphylococcus aureus
  REGION 1..1052: note = MISC_FEATURE - SaKKH Cas9 polypeptide sequence
KRNYILGLDIGITSVGYGIIDYETRDVIDAGVRLFKEANVENNEGRRSKRGARRLKRRRRHRIQRVKKLLFDYNLLTDHSELSGINPYEARVKGLSQKLSEEEFSAALLHLAKRRGVHNVNEVEEDTGNELSTKEQISRNSKALEEKYVAELQLERLKKDGEVRGSINRFKTSDYVKEAKQLLKVQKAYHQLDQSFIDTYIDLLETRRTYYEGPGEGSPFGWKDIKEWYEMLMGHCTYFPEELRSVKYAYNADLYNALNDLNNLVITRDENEKLEYYEKFQIIENVFKQKKKPTLKQIAKEILVNEEDIKGYRVTSTGKPEFTNLKVYHDIKDITARKEIIENAELLDQIAKILTIYQSSEDIQEELTNLNSELTQEEIEQISNLKGYTGTHNLSLKAINLILDELWHTNDNQIAIFNRLKLVPKKVDLSQQKEIPTTLVDDFILSPVVKRSFIQSIKVINAIIKKYGLPNDIIIELAREKNSKDAQKMINEMQKRNRQTNERIEEIIRTTGKENAKYLIEKIKLHDMQEGKCLYSLEAIPLEDLLNNPFNYEVDHIIPRSVSFDNSFNNKVLVKQEEASKKGNRTPFQYLSSSDSKISYETFKKHILNLAKGKGRISKTKKEYLLEERDINRFSVQKDFINRNLVDTRYATRGLMNLLRSYFRVNNLDVKVKSINGGFTSFLRRKWKFKKERNKGYKHHAEDALIIANADFIFKEWKKLDKAKKVMENQMFEEKQAESMPEIETEQEYKEIFITPHQIKHIKDFKDYKYSHRVDKKPNRKLINDTLYSTRKDDKGNTLIVNNLNGLYDKDNDKLKKLINKSPEKLLMYHHDPQTYQKLKLIMEQYGDEKNPLYKYYEETGNYLTKYSKKDNGPVIKKIKYYGNKLNAHLDITDDYPNSRNKVVKLSLKPYRFDVYLDNGVYKFVTVKNLDVIKKENYYEVNSKCYEEAKKLKKISNQAEFIASFYKNDLIKINGELYRVIGVNNDLLNRIEVNMIDITYREYLENMNDKRPPHIIKTIASKTQSIKKYSTDILGNLYEVKSKKHPQIIKKG

SEQ ID NO: 221 - protein, 707 aa, synthetic construct
  REGION 1..707: note = Casphi-1 polypeptide sequence
MADTPTLFTQFLRHHLPGQRFRKDILKQAGRILANKGEDATIAFLRGKSEESPPDFQPPVKCPIIACSRPLTEWPIYQASVAIQGYVYGQSLAEFEASDPGCSKDGLLGWFDKTGVCTDYFSVQGLNLIFQNARKRYIGVQTKVTNRNEKRHKKLKRINAKRIAEGLPELTSDEPESALDETGHLIDPPGLNTNIYCYQQVSPKPLALSEVNQLPTAYAGYSTSGDDPIQPMVTKDRLSISKGQPGYIPEHQRALLSQKKHRRMRGYGLKARALLVIVRIQDDWAVIDLRSLLRNAYWRRIVQTKEPSTITKLLKLVTGDPVLDATRMVATFTYKPGIVQVRSAKCLKNKQGSKLFSERYLNETVSVTSIDLGSNNLVAVATYRLVNGNTPELLQRFTLPSHLVKDFERYKQAHDTLEDSIQKTAVASLPQGQQTEIRMWSMYGFREAQERVCQELGLADGSIPWNVMTATSTILTDLFLARGGDPKKCMFTSEPKKKKNSKQVLYKIRDRAWAKMYRTLLSKETREAWNKALWGLKRGSPDYARLSKRKEELARRCVNYTISTAEKRAQCGRTIVALEDLNIGFFHGRGKQEPGWVGLFTRKKENRWLMQALHKAFLELAHHRGYHVIEVNPAYTSQTCPVCRHCDPDNRDQHNREAFHCIGCGFRGNADLDVATHNIAMVAITGESLKRARGSVASKTPQPLAAE

SEQ ID NO: 222 - protein, 757 aa, synthetic construct
  REGION 1..757: note = Casphi-2 polypeptide sequence
MPKPAVESEFSKVLKKHFPGERFRSSYMKRGGKILAAQGEEAVVAYLQGKSEEEPPNFQPPAKCHVVTKSRDFAEWPIMKASEAIQRYIYALSTTERAACKPGKSSESHAAWFAATGVSNHGYSHVQGLNLIFDHTLGRYDGVLKKVQLRNEKARARLESINASRADEGLPEIKAEEEEVATNETGHLLQPPGINPSFYVYQTISPQAYRPRDEIVLPPEYAGYVRDPNAPIPLGVVRNRCDIQKGCPGYIPEWQREAGTAISPKTGKAVTVPGLSPKKNKRMRRYWRSEKEKAQDALLVTVRIGTDWVVIDVRGLLRNARWRTIAPKDISLNALLDLFTGDPVIDVRRNIVTFTYTLDACGTYARKWTLKGKQTKATLDKLTATQTVALVAIDLGQTNPISAGISRVTQENGALQCEPLDRFTLPDDLLKDISAYRIAWDRNEEELRARSVEALPEAQQAEVRALDGVSKETARTQLCADFGLDPKRLPWDKMSSNTTFISEALLSNSVSRDQVFFTPAPKKGAKKKAPVEVMRKDRTWARAYKPRLSVEAQKLKNEALWALKRTSPEYLKLSRRKEELCRRSINYVIEKTRRRTQCQIVIPVIEDLNVRFFHGSGKRLPGWDNFFTAKKENRWFIQGLHKAFSDLRTHRSFYVFEVRPERTSITCPKCGHCEVGNRDGEAFQCLSCGKTCNADLDVATHNLTQVALTGKTMPKREEPRDAQGTAPARKTKKASKSKAPPAEREDQTPAQEPSQTS

SEQ ID NO: 223 - protein, 766 aa, synthetic construct
  REGION 1..766: note = Casphi-3 polypeptide sequence
MEKEITELTKIRREFPNKKFSSTDMKKAGKLLKAEGPDAVRDFLNSCQEIIGDFKPPVKTNIVSISRPFEEWPVSMVGRAIQEYYFSLTKEELESVHPGTSSEDHKSFFNITGLSNYNYTSVQGLNLIFKNAKAIYDGTLVKANNKNKKLEKKFNEINHKRSLEGLPIITPDFEEPFDENGHLNNPPGINRNIYGYQGCAAKVFVPSKHKMVSLPKEYEGYNRDPNLSLAGFRNRLEIPEGEPGHVPWFQRMDIPEGQIGHVNKIQRFNFVHGKNSGKVKFSDKTGRVKRYHHSKYKDATKPYKFLEESKKVSALDSILAIITIGDDWVVFDIRGLYRNVFYRELAQKGLTAVQLLDLFTGDPVIDPKKGVVTFSYKEGVVPVFSQKIVPRFKSRDTLEKLTSQGPVALLSVDLGQNEPVAARVCSLKNINDKITLDNSCRISFLDDYKKQIKDYRDSLDELEIKIRLEAINSLETNQQVEIRDLDVFSADRAKANTVDMFDIDPNLISWDSMSDARVSTQISDLYLKNGGDESRVYFEINNKRIKRSDYNISQLVRPKLSDSTRKNLNDSIWKLKRTSEEYLKLSKRKLELSRAVVNYTIRQSKLLSGINDIVIILEDLDVKKKFNGRGIRDIGWDNFFSSRKENRWFIPAFHKAFSELSSNRGLCVIEVNPAWTSATCPDCGFCSKENRDGINFTCRKCGVSYHADIDVATLNIARVAVLGKPMSGPADRERLGDTKKPRVARSRKTMKRKDISNSTVEAMVTA

SEQ ID NO: 224 - protein, 765 aa, synthetic construct
  REGION 1..765: note = Casphi-4 polypeptide sequence
MYSLEMADLKSEPSLLAKLLRDRFPGKYWLPKYWKLAEKKRLTGGEEAACEYMADKQLDSPPPNFRPPARCVILAKSRPFEDWPVHRVASKAQSFVIGLSEQGFAALRAAPPSTADARRDWLRSHGASEDDLMALEAQLLETIMGNAISLHGGVLKKIDNANVKAAKRLSGRNEARLNKGLQELPPEQEGSAYGADGLLVNPPGLNLNIYCRKSCCPKPVKNTARFVGHYPGYLRDSDSILISGTMDRLTIIEGMPGHIPAWQREQGLVKPGGRRRRLSGSESNMRQKVDPSTGPRRSTRSGTVNRSNQRTGRNGDPLLVEIRMKEDWVLLDARGLLRNLRWRESKRGLSCDHEDLSLSGLLALFSGDPVIDPVRNEVVFLYGEGIIPVRSTKPVGTRQSKKLLERQASMGPLTLISCDLGQTNLIAGRASAISLTHGSLGVRSSVRIELDPEIIKSFERLRKDADRLETEILTAAKETLSDEQRGEVNSHEKDSPQTAKASLCRELGLHPPSLPWGQMGPSTTFIADMLISHGRDDDAFLSHGEFPTLEKRKKFDKRFCLESRPLLSSETRKALNESLWEVKRTSSEYARLSQRKKEMARRAVNFVVEISRRKTGLSNVIVNIEDLNVRIFHGGGKQAPGWDGFFRPKSENRWFIQAIHKAFSDLAAHHGIPVIESDPQRTSMTCPECGHCDSKNRNGVRFLCKGCGASMDADFDAACRNLERVALTGKPMPKPSTSCERLLSATTGKVCSDHSLSHDAIEKAS

SEQ ID NO: 225 - protein, 793 aa, synthetic construct
  REGION 1..793: note = Casphi-5 polypeptide sequence
MSSLPTPLELLKQKHADLFKGLQFSSKDNKMAGKVLKKDGEEAALAFLSERGVSRGELPNFRPPAKTLVVAQSRPFEEFPIYRVSEAIQLYVYSLSVKELETVPSGSSTKKEHQRFFQDSSVPDFGYTSVQGLNKIFGLARGIYLGVITRGENQLQKAKSKHEALNKKRRASGEAETEFDPTPYEYMTPERKLAKPPGVNHSIMCYVDISVDEFDFRNPDGIVLPSEYAGYCREINTAIEKGTVDRLGHLKGGPGYIPGHQRKESTTEGPKINFRKGRIRRSYTALYAKRDSRRVRQGKLALPSYRHHMMRLNSNAESAILAVIFFGKDWVVFDLRGLLRNVRWRNLFVDGSTPSTLLGMFGDPVIDPKRGVVAFCYKEQIVPVVSKSITKMVKAPELLNKLYLKSEDPLVLVAIDLGQTNPVGVGVYRVMNASLDYEVVTRFALESELLREIESYRQRTNAFEAQIRAETFDAMTSEEQEEITRVRAFSASKAKENVCHRFGMPVDAVDWATMGSNTIHIAKWVMRHGDPSLVEVLEYRKDNEIKLDKNGVPKKVKLTDKRIANLTSIRLRFSQETSKHYNDTMWELRRKHPVYQKLSKSKADFSRRVVNSIIRRVNHLVPRARIVFIIEDLKNLGKVFHGSGKRELGWDSYFEPKSENRWFIQVLHKAFSETGKHKGYYIIECWPNWTSCTCPKCSCCDSENRHGEVFRCLACGYTCNTDFGTAPDNLVKIATTGKGLPGPKKRCKGSSKGKNPKIARSSETGVSVTESGAPKVKKSSPTQTSQSSSQSAP

SEQ ID NO: 226 - protein, 441 aa, synthetic construct
  REGION 1..441: note = Casphi-6 polypeptide sequence
MNKIEKEKTPLAKLMNENFAGLRFPFAIIKQAGKKLLKEGELKTIEYMTGKGSIEPLPNFKPPVKCLIVAKRRDLKYFPICKASCEIQSYVYSLNYKDFMDYFSTPMTSQKQHEEFFKKSGLNIEYQNVAGLNLIFNNVKNTYNGVILKVKNRNEKLKKKAIKNNYEFEEIKTFNDDGCLINKPGINNVIYCFQSISPKILKNITHLPKEYNDYDCSVDRNIIQKYVSRLDIPESQPGHVPEWQRKLPEFNNTNNPRRRRKWYSNGRNISKGYSVDQVNQAKIEDSLLAQIKIGEDWIILDIRGLLRDLNRRELISYKNKLTIKDVLGFFSDYPIIDIKKNLVTFCYKEGVIQVVSQKSIGNKKSKQLLEKLIENKPIALVSIDLGQTNPVSVKISKLNKINNKISIESFTYRFLNEEILKEIEKYRKDYDKLELKLINEA

SEQ ID NO: 227 - protein, 772 aa, synthetic construct
  REGION 1..772: note = Casphi-7 polypeptide sequence
MSNTAVSTREHMSNKTTPPSPLSLLLRAHFPGLKFESQDYKIAGKKLRDGGPEAVISYLTGKGQAKLKDVKPPAKAFVIAQSRPFIEWDLVRVSRQIQEKIFGIPATKGRPKQDGLSETAFNEAVASLEVDGKSKLNEETRAAFYEVLGLDAPSLHAQAQNALIKSAISIREGVLKKVENRNEKNLSKTKRRKEAGEEATFVEEKAHDERGYLIHPPGVNQTIPGYQAVVIKSCPSDFIGLPSGCLAKESAEALTDYLPHDRMTIPKGQPGYVPEWQHPLLNRRKNRRRRDWYSASLNKPKATCSKRSGTPNRKNSRTDQIQSGRFKGAIPVLMRFQDEWVIIDIRGLLRNARYRKLLKEKSTIPDLLSLFTGDPSIDMRQGVCTFIYKAGQACSAKMVKTKNAPEILSELTKSGPVVLVSIDLGQTNPIAAKVSRVTQLSDGQLSHETLLRELLSNDSSDGKEIARYRVASDRLRDKLANLAVERLSPEHKSEILRAKNDTPALCKARVCAALGLNPEMIAWDKMTPYTEFLATAYLEKGGDRKVATLKPKNRPEMLRRDIKFKGTEGVRIEVSPEAAEAYREAQWDLQRTSPEYLRLSTWKQELTKRILNQLRHKAAKSSQCEVVVMAFEDLNIKMMHGNGKWADGGWDAFFIKKRENRWFMQAFHKSLTELGAHKGVPTIEVTPHRTSITCTKCGHCDKANRDGERFACQKCGFVAHADLEIATDNIERVALTGKPMPKPESERSGDAKKSVGARKAAFKPEEDAEAAE

SEQ ID NO: 228 - protein, 717 aa, synthetic construct
  REGION 1..717: note = Casphi-8 polypeptide sequence
MIKPTVSQFLTPGFKLIRNHSRTAGLKLKNEGEEACKKFVRENEIPKDECPNFQGGPAIANIIAKSREFTEWEIYQSSLAIQEVIFTLPKDKLPEPILKEEWRAQWLSEHGLDTVPYKEAAGLNLIIKNAVNTYKGVQVKVDNKNKNNLAKINRKNEIAKLNGEQEISFEEIKAFDDKGYLLQKPSPNKSIYCYQSVSPKPFITSKYHNVNLPEEYIGYYRKSNEPIVSPYQFDRLRIPIGEPGYVPKWQYTFLSKKENKRRKLSKRIKNVSPILGIICIKKDWCVFDMRGLLRTNHWKKYHKPTDSINDLFDYFTGDPVIDTKANVVRFRYKMENGIVNYKPVREKKGKELLENICDQNGSCKLATVDVGQNNPVAIGLFELKKVNGELTKTLISRHPTPIDFCNKITAYRERYDKLESSIKLDAIKQLTSEQKIEVDNYNNNFTPQNTKQIVCSKLNINPNDLPWDKMISGTHFISEKAQVSNKSEIYFTSTDKGKTKDVMKSDYKWFQDYKPKLSKEVRDALSDIEWRLRRESLEFNKLSKSREQDARQLANWISSMCDVIGIENLVKKNNFFGGSGKREPGWDNFYKPKKENRWWINAIHKALTELSQNKGKRVILLPAMRTSITCPKCKYCDSKNRNGEKFNCLKCGIELNADIDVATENLATVAITAQSMPKPTCERSGDAKKPVRARKAKAPEFHDKLAPSYTVVLREAV

SEQ ID NO: 229 - protein, 793 aa, synthetic construct
  REGION 1..793: note = Casphi-9 polypeptide sequence
MRSSREIGDKILMRQPAEKTAFQVFRQEVIGTQKLSGGDAKTAGRLYKQGKMEAAREWLLKGARDDVPPNFQPPAKCLVVAVSHPFEEWDISKTNHDVQAYIYAQPLQAEGHLNGLSEKWEDTSADQHKLWFEKTGVPDRGLPVQAINKIAKAAVNRAFGVVRKVENRNEKRRSRDNRIAEHNRENGLTEVVREAPEVATNADGFLLHPPGIDPSILSYASVSPVPYNSSKHSFVRLPEEYQAYNVEPDAPIPQFVVEDRFAIPPGQPGYVPEWQRLKCSTNKHRRMRQWSNQDYKPKAGRRAKPLEFQAHLTRERAKGALLVVMRIKEDWVVFDVRGLLRNVEWRKVLSEEAREKLTLKGLLDLFTGDPVIDTKRGIVTFLYKAEITKILSKRTVKTKNARDLLLRLTEPGEDGLRREVGLVAVDLGQTHPIAAAIYRIGRTSAGALESTVLHRQGLREDQKEKLKEYRKRHTALDSRLRKEAFETLSVEQQKEIVTVSGSGAQITKDKVCNYLGVDPSTLPWEKMGSYTHFISDDFLRRGGDPNIVHFDRQPKKGKVSKKSQRIKRSDSQWVGRMRPRLSQETAKARMEADWAAQNENEEYKRLARSKQELARWCVNTLLQNTRCITQCDEIVVVIEDLNVKSLHGKGAREPGWDNFFTPKTENRWFIQILHKTFSELPKHRGEHVIEGCPLRTSITCPACSYCDKNSRNGEKFVCVACGATFHADFEVATYNLVRLATTGMPMPKSLERQGGGEKAGGARKARKKAKQVEKIVVQANANVTMNGASLHSP

SEQ ID NO: 230 - protein, 812 aa, synthetic construct
  REGION 1..812: note = Casphi-10 polypeptide sequence
MDMLDTETNYATETPAQQQDYSPKPPKKAQRAPKGFSKKARPEKKPPKPITLFTQKHFSGVRFLKRVIRDASKILKLSESRTITFLEQAIERDGSAPPDVTPPVHNTIMAVTRPFEEWPEVILSKALQKHCYALTKKIKIKTWPKKGPGKKCLAAWSARTKIPLIPGQVQATNGLFDRIGSIYDGVEKKVTNRNANKKLEYDEAIKEGRNPAVPEYETAYNIDGTLINKPGYNPNLYITQSRTPRLITEADRPLVEKILWQMVEKKTQSRNQARRARLEKAAHLQGLPVPKFVPEKVDRSQKIEIRIIDPLDKIEPYMPQDRMAIKASQDGHVPYWQRPFLSKRRNRRVRAGWGKQVSSIQAWLTGALLVIVRLGNEAFLADIRGALRNAQWRKLLKPDATYQSLFNLFTGDPVVNTRTNHLTMAYREGVVNIVKSRSFKGRQTREHLLTLLGQGKTVAGVSFDLGQKHAAGLLAAHFGLGEDGNPVFTPIQACFLPQRYLDSLTNYRNRYDALTLDMRRQSLLALTPAQQQEFADAQRDPGGQAKRACCLKLNLNPDEIRWDLVSGISTMISDLYIERGGDPRDVHQQVETKPKGKRKSEIRILKIRDGKWAYDFRPKIADETRKAQREQLWKLQKASSEFERLSRYKINIARAIANWALQWGRELSGCDIVIPVLEDLNVGSKFFDGKGKWLLGWDNRFTPKKENRWFIKVLHKAVAELAPHRGVPVYEVMPHRTSMTCPACHYCHPTNREGDRFECQSCHVVKNTDRDVAPYNILRVAVEGKTLDRWQAEKKPQAEPDRPMILIDNQES

SEQ ID NO: 231 - protein, 84 aa, synthetic construct
  REGION 1..84: note = synthetic polypeptide sequence
MTNLSDIIEKETGKQLVIQESILMLPEEVEEVIGNKPESDILVHTAYDESTDENVMLLTSDAPEYKPWALVIQDSNGENKIKML

SEQ ID NO: 232 - protein, 1129 aa, Alicyclobacillus acidoterrestris
  REGION 1..1129: note = MISC_FEATURE - Cas12b/C2c1; sp|T0D7A2|C2C1_ALIAG CRISPR-associated endonuclease C2c1 OS = Alicyclobacillus acido-terrestris (strain ATCC 49025 /DSM 3922/ CIP 106132 / NCIMB 13137/GD3B) GN=c2c1 PE=1 SV=1; Cas12b/C2c1 polypeptide sequence
MAVKSIKVKLRLDDMPEIRAGLWKLHKEVNAGVRYYTEWLSLLRQENLYRRSPNGDGEQECDKTAEECKAELLERLRARQVENGHRGPAGSDDELLQLARQLYELLVPQAIGAKGDAQQIARKFLSPLADKDAVGGLGIAKAGNKPRWVRMREAGEPGWEEEKEKAETRKSADRTADVLRALADFGLKPLMRVYTDSEMSSVEWKPLRKGQAVRTWDRDMFQQAIERMMSWESWNQRVGQEYAKLVEQKNRFEQKNFVGQEHLVHLVNQLQQDMKEASPGLESKEQTAHYVTGRALRGSDKVFEKWGKLAPDAPFDLYDAEIKNVQRRNTRRFGSHDLFAKLAEPEYQALWREDASFLTRYAVYNSILRKLNHAKMFATFTLPDATAHPIWTRFDKLGGNLHQYTFLFNEFGERRHAIRFHKLLKVENGVAREVDDVTVPISMSEQLDNLLPRDPNEPIALYFRDYGAEQHFTGEFGGAKIQCRRDQLAHMHRRRGARDVYLNVSVRVQSQSEARGERRPPYAAVFRLVGDNHRAFVHFDKLSDYLAEHPDDGKLGSEGLLSGLRVMSVDLGLRTSASISVFRVARKDELKPNSKGRVPFFFPIKGNDNLVAVHERSQLLKLPGETESKDLRAIREERQRTLRQLRTQLAYLRLLVRCGSEDVGRRERSWAKLIEQPVDAANHMTPDWREAFENELQKLKSLHGICSDKEWMDAVYESVRRVWRHMGKQVRDWRKDVRSGERPKIRGYAKDVVGGNSIEQIEYLERQYKFLKSWSFFGKVSGQVIRAEKGSRFAITLREHIDHAKEDRLKKLADRIIMEALGYVYALDERGKGKWVAKYPPCQLILLEELSEYQFNNDRPPSENNQLMQWSHRGVFQELINQAQVHDLLVGTMYAAFSSRFDARTGAPGIRCRRVPARCTQEHNPEPFPWWLNKFVVEHTLDACPLRADDLIPTGEGEIFVSPFSAEEGDFHQIHADLNAAQNLQQRLWSDFDISQIRLRCDWGEVDGELVLIPRLTGKRTADSYSNKVFYTNTGVTYYERERGKKRRKVFAQEKLSEEEAELLVEADEAREKSVVLMRDPSGIINRGNWTRQKEFWSMVNQRIEGYLVKQIRSRVPLQDSACENTGDI

SEQ ID NO: 233 - protein, 1368 aa, Mus musculus
  REGION 1..1368: note = MISC_FEATURE - high fidelity Cas9 polypeptide sequence
MDKKYSIGLAIGTNSVGWAVITDEYKVPSKKFKVLGNTDRHSIKKNLIGALLFDSGETAEATRLKRTARRRYTRRKNRICYLQEIFSNEMAKVDDSFFHRLEESFLVEEDKKHERHPIFGNIVDEVAYHEKYPTIYHLRKKLVDSTDKADLRLIYLALAHMIKFRGHFLIEGDLNPDNSDVDKLFIQLVQTYNQLFEENPINASGVDAKAILSARLSKSRRLENLIAQLPGEKKNGLFGNLIALSLGLTPNFKSNFDLAEDAKLQLSKDTYDDDLDNLLAQIGDQYADLFLAAKNLSDAILLSDILRVNTEITKAPLSASMIKRYDEHHQDLTLLKALVRQQLPEKYKEIFFDQSKNGYAGYIDGGASQEEFYKFIKPILEKMDGTEELLVKLNREDLLRKQRTFDNGSIPHQIHLGELHAILRRQEDFYPFLKDNREKIEKILTFRIPYYVGPLARGNSRFAWMTRKSEETITPWNFEEVVDKGASAQSFIERMTAFDKNLPNEKVLPKHSLLYEYFTVYNELTKVKYVTEGMRKPAFLSGEQKKAIVDLLFKTNRKVTVKQLKEDYFKKIECFDSVEISGVEDRFNASLGTYHDLLKIIKDKDFLDNEENEDILEDIVLTLTLFEDREMIEERLKTYAHLFDDKVMKQLKRRRYTGWGALSRKLINGIRDKQSGKTILDFLKSDGFANRNFMALIHDDSLTFKEDIQKAQVSGQGDSLHEHIANLAGSPAIKKGILQTVKVVDELVKVMGRHKPENIVIEMARENQTTQKGQKNSRERMKRIEEGIKELGSQILKEHPVENTQLQNEKLYLYYLQNGRDMYVDQELDINRLSDYDVDHIVPQSFLKDDSIDNKVLTRSDKNRGKSDNVPSEEVVKKMKNYWRQLLNAKLITQRKFDNLTKAERGGLSELDKAGFIKRQLVETRAITKHVAQILDSRMNTKYDENDKLIREVKVITLKSKLVSDFRKDFQFYKVREINNYHHAHDAYLNAVVGTALIKKYPKLESEFVYGDYKVYDVRKMIAKSEQEIGKATAKYFFYSNIMNFFKTEITLANGEIRKRPLIETNGETGEIVWDKGRDFATVRKVLSMPQVNIVKKTEVQTGGFSKESILPKRNSDKLIARKKDWDPKKYGGFDSPTVAYSVLVVAKVEKGKSKKLKSVKELLGITIMERSSFEKNPIDFLEAKGYKEVKKDLIIKLPKYSLFELENGRKRMLASAGELQKGNELALPSKYVNFLYLASHYEKLKGSPEDNEQKQLFVEQHKHYLDEIIEQISEFSKRVILADANLDKVLSAYNKHRDKPIREQAENIIHLFTLTNLGAPAAFKYFDTTIDRKRYTSTKEVLDATLIHQSITGLYETRIDLSQLGGD

SEQ ID NO: 234 - protein, 1368 aa, Streptococcus pyogenes
  REGION 1..1368: note = MISC_FEATURE - PAM-binding SpEQR Cas9 polypeptide sequence
MDKKYSIGLAIGTNSVGWAVITDEYKVPSKKFKVLGNTDRHSIKKNLIGALLFDSGETAEATRLKRTARRRYTRRKNRICYLQEIFSNEMAKVDDSFFHRLEESVLVEEDKKHERHPIFGNIVDEVAYHEKYPTIYHLRKKLVDSTDKADLRLIYLALAHMIKFRGHFLIEGDLNPDNSDVDKLFIQLVQTYNQLFEENPINASGVDAKAILSARLSKSRRLENLIAQLPGEKKNGLFGNLIALSLGLTPNFKSNFDLAEDAKLQLSKDTYDDDLDNLLAQIGDQYADLFLAAKNLSDAILLSDILRVNTEITKAPLSASMIKRYDEHHQDLTLLKALVRQQLPEKYKEIFFDQSKNGYAGYIDGGASQEEFYKFIKPILEKMDGTEELLVKLNREDLLRKQRTFDNGSIPHQIHLGELHAILRRQEDFYPFLKDNREKIEKILTFRIPYYVGPLARGNSRFAWMTRKSEETITPWNFEEVVDKGASAQSFIERMTNFDKNLPNEKVLPKHSLLYEYFTVYNELTKVKYVTEGMRKPAFLSGEQKKAIVDLLFKTNRKVTVKQLKEDYFKKIECFDSVEISGVEDRFNASLGTYHDLLKIIKDKDFLDNEENEDILEDIVLTLTLFEDREMIEERLKTYAHLFDDKVMKQLKRRRYTGWGRLSRKLINGIRDKQSGKTILDFLKSDGFANRNFMQLIHDDSLTFKEDIQKAQVSGQGDSLHEHIANLAGSPAIKKGILQTVKVVDELVKVMGRHKPENIVIEMARENQTTQKGQKNSRERMKRIEEGIKELGSQILKEHPVENTQLQNEKLYLYYLQNGRDMYVDQELDINRLSDYDVDHIVPQSFLKDDSIDNKVLTRSDKNRGKSDNVPSEEVVKKMKNYWRQLLNAKLITQRKFDNLTKAERGGLSELDKAGFIKRQLVETRQITKHVAQILDSRMNTKYDENDKLIREVKVITLKSKLVSDFRKDFQFYKVREINNYHHAHDAYLNAVVGTALIKKYPKLESEFVYGDYKVYDVRKMIAKSEQEIGKATAKYFFYSNIMNFFKTEITLANGEIRKRPLIETNGETGEIVWDKGRDFATVRKVLSMPQVNIVKKTEVQTGGFSKESILPKRNSDKLIARKKDWDPKKYGGFESPTVAYSVLVVAKVEKGKSKKLKSVKELLGITIMERSSFEKNPIDFLEAKGYKEVKKDLIIKLPKYSLFELENGRKRMLASAGELQKGNELALPSKYVNFLYLASHYEKLKGSPEDNEQKQLFVEQHKHYLDEIIEQISEFSKRVILADANLDKVLSAYNKHRDKPIREQAENIIHLFTLTNLGAPAAFKYFDTTIDRKQYRSTKEVLDATLIHQSITGLYETRIDLSQLGGD

SEQ ID NO: 235 - protein, 1368 aa, Streptococcus pyogenes
  REGION 1..1368: note = MISC_FEATURE - PAM-binding SpVQR Cas9 polypeptide sequence
MDKKYSIGLAIGTNSVGWAVITDEYKVPSKKFKVLGNTDRHSIKKNLIGALLFDSGETAEATRLKRTARRRYTRRKNRICYLQEIFSNEMAKVDDSFFHRLEESFLVEEDKKHERHPIFGNIVDEVAYHEKYPTIYHLRKKLVDSTDKADLRLIYLALAHMIKFRGHFLIEGDLNPDNSDVDKLFIQLVQTYNQLFEENPINASGVDAKAILSARLSKSRRLENLIAQLPGEKKNGLFGNLIALSLGLTPNFKSNFDLAEDAKLQLSKDTYDDDLDNLLAQIGDQYADLFLAAKNLSDAILLSDILRVNTEITKAPLSASMIKRYDEHHQDLTLLKALVRQQLPEKYKEIFFDQSKNGYAGYIDGGASQEEFYKFIKPILEKMDGTEELLVKLNREDLLRKQRTFDNGSIPHQIHLGELHAILRRQEDFYPFLKDNREKIEKILTFRIPYYVGPLARGNSRFAWMTRKSEETITPWNFEEVVDKGASAQSFIERMTNFDKNLPNEKVLPKHSLLYEYFTVYNELTKVKYVTEGMRKPAFLSGEQKKAIVDLLFKTNRKVTVKQLKEDYFKKIECFDSVEISGVEDRFNASLGTYHDLLKIIKDKDFLDNEENEDILEDIVLTLTLFEDREMIEERLKTYAHLFDDKVMKQLKRRRYTGWGRLSRKLINGIRDKQSGKTILDFLKSDGFANRNFMQLIHDDSLTFKEDIQKAQVSGQGDSLHEHIANLAGSPAIKKGILQTVKVVDELVKVMGRHKPENIVIEMARENQTTQKGQKNSRERMKRIEEGIKELGSQILKEHPVENTQLQNEKLYLYYLQNGRDMYVDQELDINRLSDYDVDHIVPQSFLKDDSIDNKVLTRSDKNRGKSDNVPSEEVVKKMKNYWRQLLNAKLITQRKFDNLTKAERGGLSELDKAGFIKRQLVETRQITKHVAQILDSRMNTKYDENDKLIREVKVITLKSKLVSDFRKDFQFYKVREINNYHHAHDAYLNAVVGTALIKKYPKLESEFVYGDYKVYDVRKMIAKSEQEIGKATAKYFFYSNIMNFFKTEITLANGEIRKRPLIETNGETGEIVWDKGRDFATVRKVLSMPQVNIVKKTEVQTGGFSKESILPKRNSDKLIARKKDWDPKKYGGFVSPTVAYSVLVVAKVEKGKSKKLKSVKELLGITIMERSSFEKNPIDFLEAKGYKEVKKDLIIKLPKYSLFELENGRKRMLASAGELQKGNELALPSKYVNFLYLASHYEKLKGSPEDNEQKQLFVEQHKHYLDEIIEQISEFSKRVILADANLDKVLSAYNKHRDKPIREQAENIIHLFTLTNLGAPAAFKYFDTTIDRKQYRSTKEVLDATLIHQSITGLYETRIDLSQLGGD

SEQ ID NO: 236 - protein, 1368 aa, Streptococcus pyogenes
  REGION 1..1368: note = MISC_FEATURE - SpVQR Cas9 polypeptide sequence
MDKKYSIGLAIGTNSVGWAVITDEYKVPSKKFKVLGNTDRHSIKKNLIGALLFDSGETAEATRLKRTARRRYTRRKNRICYLQEIFSNEMAKVDDSFFHRLEESFLVEEDKKHERHPIFGNIVDEVAYHEKYPTIYHLRKKLVDSTDKADLRLIYLALAHMIKFRGHFLIEGDLNPDNSDVDKLFIQLVQTYNQLFEENPINASGVDAKAILSARLSKSRRLENLIAQLPGEKKNGLFGNLIALSLGLTPNFKSNFDLAEDAKLQLSKDTYDDDLDNLLAQIGDQYADLFLAAKNLSDAILLSDILRVNTEITKAPLSASMIKRYDEHHQDLTLLKALVRQQLPEKYKEIFFDQSKNGYAGYIDGGASQEEFYKFIKPILEKMDGTEELLVKLNREDLLRKQRTFDNGSIPHQIHLGELHAILRRQEDFYPFLKDNREKIEKILTFRIPYYVGPLARGNSRFAWMTRKSEETITPWNFEEVVDKGASAQSFIERMTNFDKNLPNEKVLPKHSLLYEYFTVYNELTKVKYVTEGMRKPAFLSGEQKKAIVDLLFKTNRKVTVKQLKEDYFKKIECFDSVEISGVEDRFNASLGTYHDLLKIIKDKDFLDNEENEDILEDIVLTLTLFEDREMIEERLKTYAHLFDDKVMKQLKRRRYTGWGRLSRKLINGIRDKQSGKTILDFLKSDGFANRNFMQLIHDDSLTFKEDIQKAQVSGQGDSLHEHIANLAGSPAIKKGILQTVKVVDELVKVMGRHKPENIVIEMARENQTTQKGQKNSRERMKRIEEGIKELGSQILKEHPVENTQLQNEKLYLYYLQNGRDMYVDQELDINRLSDYDVDHIVPQSFLKDDSIDNKVLTRSDKNRGKSDNVPSEEVVKKMKNYWRQLLNAKLITQRKFDNLTKAERGGLSELDKAGFIKRQLVETRQITKHVAQILDSRMNTKYDENDKLIREVKVITLKSKLVSDFRKDFQFYKVREINNYHHAHDAYLNAVVGTALIKKYPKLESEFVYGDYKVYDVRKMIAKSEQEIGKATAKYFFYSNIMNFFKTEITLANGEIRKRPLIETNGETGEIVWDKGRDFATVRKVLSMPQVNIVKKTEVQTGGFSKESILPKRNSDKLIARKKDWDPKKYGGFVSPTVAYSVLVVAKVEKGKSKKLKSVKELLGITIMERSSFEKNPIDFLEAKGYKEVKKDLIIKLPKYSLFELENGRKRMLASARELQKGNELALPSKYVNFLYLASHYEKLKGSPEDNEQKQLFVEQHKHYLDEIIEQISEFSKRVILADANLDKVLSAYNKHRDKPIREQAENIIHLFTLTNLGAPAAFKYFDTTIDRKEYRSTKEVLDATLIHQSITGLYETRIDLSQLGGD

SEQ ID NO: 237 - protein, 1359 aa, Streptococcus macacae
  REGION 1..1359: note = MISC_FEATURE - SpyMacCas9 polypeptide sequence
MDKKYSIGLDIGTNSVGWAVITDDYKVPSKKFKVLGNTDRHSIKKNLIGALLFGSGETAEATRLKRTARRRYTRRKNRICYLQEIFSNEMAKVDDSFFHRLEESFLVEEDKKHERHPIFGNIVDEVAYHEKYPTIYHLRKKLADSTDKADLRLIYLALAHMIKFRGHFLIEGDLNPDNSDVDKLFIQLVQIYNQLFEENPINASRVDAKAILSARLSKSRRLENLIAQLPGEKRNGLFGNLIALSLGLTPNFKSNFDLAEDAKLQLSKDTYDDDLDNLLAQIGDQYADLFLAAKNLSDAILLSDILRVNSEITKAPLSASMIKRYDEHHQDLTLLKALVRQQLPEKYKEIFFDQSKNGYAGYIDGGASQEEFYKFIKPILEKMDGTEELLVKLNREDLLRKQRTFDNGSIPHQIHLGELHAILRRQEDFYPFLKDNREKIEKILTFRIPYYVGPLARGNSRFAWMTRKSEETITPWNFEEVVDKGASAQSFIERMTNFDKNLPNEKVLPKHSLLYEYFTVYNELTKVKYVTEGMRKPAFLSGEQKKAIVDLLFKTNRKVTVKQLKEDYFKKIECFDSVEISGVEDRFNASLGAYHDLLKIIKDKDFLDNEENEDILEDIVLTLTLFEDRGMIEERLKTYAHLFDDKVMKQLKRRRYTGWGRLSRKLINGIRDKQSGKTILDFLKSDGFANRNFMQLIHDDSLTFKEDIQKAQVSGQGHSLHEQIANLAGSPAIKKGILQTVKIVDELVKVMGHKPENIVIEMARENQTTQKGQKNSRERMKRIEEGIKELGSQILKEHPVENTQLQNEKLYLYYLQNGRDMYVDQELDINRLSDYDVDHIVPQSFIKDDSIDNKVLTRSDKNRGKSDNVPSEEVVKKMKNYWRQLLNAKLITQRKFDNLTKAERGGLSELDKAGFIKRQLVETRQITKHVAQILDSRMNTKYDENDKLIREVKVITLKSKLVSDFRKDFQFYKVREINNYHHAHDAYLNAVVGTALIKKYPKLESEFVYGDYKVYDVRKMIAKSEQEIGKATAKYFFYSNIMNFFKTEITLANGEIRKRPLIETNGETGEIVWDKGRDFATVRKVLSMPQVNIVKKTEIQTVGQNGGLFDDNPKSPLEVTPSKLVPLKKELNPKKYGGYQKPTTAYPVLLITDTKQLIPISVMNKKQFEQNPVKFLRDRGYQQVGKNDFIKLPKYTLVDIGDGIKRLWASSKEIHKGNQLVVSKKSQILLYHAHHLDSDLSNDYLQNHNQQFDVLFNEIISFSKKCKLGKEHIQKIENVYSNKKNSASIEELAESFIKLLGFTQLGATSPFNFLGVKLNQKQYKGKKDYILPCTEGTLIRQSITGLYETRVDLSKIGED

SEQ ID NO: 238 - protein, 1410 aa, synthetic construct
  REGION 1..1410: note = CP5 polypeptide sequence
  REGION 1..341: note = MISC_FEATURE - Sequence derived from Cas9
  REGION 342..362: note = MISC_FEATURE - Linker sequence
  REGION 363..1388: note = MISC_FEATURE - Sequence derived from Cas9
  REGION 1389..1410: note = MISC_FEATURE - Bipartite nuclear localization sequence
EIGKATAKYFFYSNIMNFFKTEITLANGEIRKRPLIETNGETGEIVWDKGRDFATVRKVLSMPQVNIVKKTEVQTGGFSKESILPKRNSDKLIARKKDWDPKKYGGFMQPTVAYSVLVVAKVEKGKSKKLKSVKELLGITIMERSSFEKNPIDFLEAKGYKEVKKDLIIKLPKYSLFELENGRKRMLASAKFLQKGNELALPSKYVNFLYLASHYEKLKGSPEDNEQKQLFVEQHKHYLDEIIEQISEFSKRVILADANLDKVLSAYNKHRDKPIREQAENIIHLFTLTNLGAPRAFKYFDTTIARKEYRSTKEVLDATLIHQSITGLYETRIDLSQLGGDGGSGGSGGSGGSGGSGGSGGMDKKYSIGLAIGTNSVGWAVITDEYKVPSKKFKVLGNTDRHSIKKNLIGALLFDSGETAEATRLKRTARRRYTRRKNRICYLQEIFSNEMAKVDDSFFHRLEESFLVEEDKKHERHPIFGNIVDEVAYHEKYPTIYHLRKKLVDSTDKADLRLIYLALAHMIKFRGHFLIEGDLNPDNSDVDKLFIQLVQTYNQLFEENPINASGVDAKAILSARLSKSRRLENLIAQLPGEKKNGLFGNLIALSLGLTPNFKSNFDLAEDAKLQLSKDTYDDDLDNLLAQIGDQYADLFLAAKNLSDAILLSDILRVNTEITKAPLSASMIKRYDEHHQDLTLLKALVRQQLPEKYKEIFFDQSKNGYAGYIDGGASQEEFYKFIKPILEKMDGTEELLVKLNREDLLRKQRTFDNGSIPHQIHLGELHAILRRQEDFYPFLKDNREKIEKILTFRIPYYVGPLARGNSRFAWMTRKSEETITPWNFEEVVDKGASAQSFIERMTNFDKNLPNEKVLPKHSLLYEYFTVYNELTKVKYVTEGMRKPAFLSGEQKKAIVDLLFKTNRKVTVKQLKEDYFKKIECFDSVEISGVEDRFNASLGTYHDLLKIIKDKDFLDNEENEDILEDIVLTLTLFEDREMIEERLKTYAHLFDDKVMKQLKRRRYTGWGRLSRKLINGIRDKQSGKTILDFLKSDGFANRNFMQLIHDDSLTFKEDIQKAQVSGQGDSLHEHIANLAGSPAIKKGILQTVKVVDELVKVMGRHKPENIVIEMARENQTTQKGQKNSRERMKRIEEGIKELGSQILKEHPVENTQLQNEKLYLYYLQNGRDMYVDQELDINRLSDYDVDHIVPQSFLKDDSIDNKVLTRSDKNRGKSDNVPSEEVVKKMKNYWRQLLNAKLITQRKFDNLTKAERGGLSELDKAGFIKRQLVETRQITKHVAQILDSRMNTKYDENDKLIREVKVITLKSKLVSDFRKDFQFYKVREINNYHHAHDAYLNAVVGTALIKKYPKLESEFVYGDYKVYDVRKMIAKSEQEGADKRTADGSEFESPKKKRKV

SEQ ID NO: 239 - protein, 1302 aa, synthetic construct
  REGION 1..1302: note = Cas12c1 polypeptide sequence
MQTKKTHLHLISAKASRKYRRTIACLSDTAKKDLERRKQSGAADPAQELSCLKTIKFKLEVPEGSKLPSFDRISQIYNALETIEKGSLSYLLFALILSGFRIFPNSSAAKTFASSSCYKNDQFASQIKEIFGEMVKNFIPSELESILKKGRRKNNKDWTEENIKRVLNSEFGRKNSEGSSALFDSFLSKFSQELFRKFDSWNEVNKKYLEAAELLDSMLASYGPFDSVCKMIGDSDSRNSLPDKSTIAFTNNAEITVDIESSVMPYMAIAALLREYRQSKSKAAPVAYVQSHLTTTNGNGLSWFFKFGLDLIRKAPVSSKQSTSDGSKSLQELFSVPDDKLDGLKFIKEACEALPEASLLCGEKGELLGYQDFRTSFAGHIDSWVANYVNRLFELIELVNQLPESIKLPSILTQKNHNLVASLGLQEAEVSHSLELFEGLVKNVRQTLKKLAGIDISSSPNEQDIKEFYAFSDVLNRLGSIRNQIENAVQTAKKDKIDLESAIEWKEWKKLKKLPKLNGLGGGVPKQQELLDKALESVKQIRHYQRIDFERVIQWAVNEHCLETVPKFLVDAEKKKINKESSTDFAAKENAVRFLLEGIGAAARGKTDSVSKAAYNWFVVNNFLAKKDLNRYFINCQGCIYKPPYSKRRSLAFALRSDNKDTIEVVWEKFETFYKEISKEIEKFNIFSQEFQTFLHLENLRMKLLLRRIQKPIPAEIAFFSLPQEYYDSLPPNVAFLALNQEITPSEYITQFNLYSSFLNGNLILLRRSRSYLRAKFSWVGNSKLIYAAKEARLWKIPNAYWKSDEWKMILDSNVLVFDKAGNVLPAPTLKKVCEREGDLRLFYPLLRQLPHDWCYRNPFVKSVGREKNVIEVNKEGEPKVASALPGSLFRLIGPAPFKSLLDDCFFNPLDKDLRECMLIVDQEISQKVEAQKVEASLESCTYSIAVPIRYHLEEPKVSNQFENVLAIDQGEAGLAYAVFSLKSIGEAETKPIAVGTIRIPSIRRLIHSVSTYRKKKQRLQNFKQNYDSTAFIMRENVTGDVCAKIVGLMKEFNAFPVLEYDVKNLESGSRQLSAVYKAVNSHFLYFKEPGRDALRKQLWYGGDSWTIDGIEIVTRERKEDGKEGVEKIVPLKVFPGRSVSARFTSKTCSCCGRNVFDWLFTEKKAKTNKKFNVNSKGELTTADGVIQLFEADRSKGPKFYARRKERTPLTKPIAKGSYSLEEIERRVRTNLRRAPKSKQSRDTSQSQYFCVYKDCALHFSGMQADENAAINIGRRFLTALRKNRRSDFPSNVKISDRLLDN

SEQ ID NO: 240 - protein, 1218 aa, synthetic construct
  REGION 1..1218: note = Cas12c2 polypeptide sequence
MTKHSIPLHAFRNSGADARKWKGRIALLAKRGKETMRTLQFPLEMSEPEAAAINTTPFAVAYNAIEGTGKGTLFDYWAKLHLAGFRFFPSGGAATIFRQQAVFEDASWNAAFCQQSGKDWPWLVPSKLYERFTKAPREVAKKDGSKKSIEFTQENVANESHVSLVGASITDKTPEDQKEFFLKMAGALAEKFDSWKSANEDRIVAMKVIDEFLKSEGLHLPSLENIAVKCSVETKPDNATVAWHDAPMSGVQNLAIGVFATCASRIDNIYDLNGGKLSKLIQESATTPNVTALSWLFGKGLEYFRTTDIDTIMQDFNIPASAKESIKPLVESAQAIPTMTVLGKKNYAPFRPNFGGKIDSWIANYASRLMLLNDILEQIEPGFELPQALLDNETLMSGIDMTGDELKELIEAVYAWVDAAKQGLATLLGRGGNVDDAVQTFEQFSAMMDTLNGTLNTISARYVRAVEMAGKDEARLEKLIECKFDIPKWCKSVPKLVGISGGLPKVEEEIKVMNAAFKDVRARMFVRFEEIAAYVASKGAGMDVYDALEKRELEQIKKLKSAVPERAHIQAYRAVLHRIGRAVQNCSEKTKQLFSSKVIEMGVFKNPSHLNNFIFNQKGAIYRSPFDRSRHAPYQLHADKLLKNDWLELLAEISATLMASESTEQMEDALRLERTRLQLQLSGLPDWEYPASLAKPDIEVEIQTALKMQLAKDTVTSDVLQRAFNLYSSVLSGLTFKLLRRSFSLKMRFSVADTTQLIYVPKVCDWAIPKQYLQAEGEIGIAARVVTESSPAKMVTEVEMKEPKALGHFMQQAPHDWYFDASLGGTQVAGRIVEKGKEVGKERKLVGYRMRGNSAYKTVLDKSLVGNTELSQCSMIIEIPYTQTVDADFRAQVQAGLPKVSINLPVKETITASNKDEQMLFDRFVAIDLGERGLGYAVFDAKTLELQESGHRPIKAITNLLNRTHHYEQRPNQRQKFQAKFNVNLSELRENTVGDVCHQINRICAYYNAFPVLEYMVPDRLDKQLKSVYESVTNRYIWSSTDAHKSARVQFWLGGETWEHPYLKSAKDKKPLVLSPGRGASGKGTSQTCSCCGRNPFDLIKDMKPRAKIAVVDGKAKLENSELKLFERNLESKDDMLARRHRNERAGMEQPLTPGNYTVDEIKALLRANLRRAPKNRRTKDTTVSEYHCVFSDCGKTMHADENAAVNIGGKFIADIEK

SEQ ID NO: 241 - protein, 1252 aa, Oleiphilus sp.
  REGION 1..1252: note = MISC_FEATURE - OspCas12c polypeptide sequence
MTKLRHRQKKLTHDWAGSKKREVLGSNGKLQNPLLMPVKKGQVTEFRKAFSAYARATKGEMTDGRKNMFTHSFEPFKTKPSLHQCELADKAYQSLHSYLPGSLAHFLLSAHALGFRIFSKSGEATAFQASSKIEAYESKLASELACVDLSIQNLTISTLFNALTTSVRGKGEETSADPLIARFYTLLTGKPLSRDTQGPERDLAEVISRKIASSFGTWKEMTANPLQSLQFFEEELHALDANVSLSPAFDVLIKMNDLQGDLKNRTIVFDPDAPVFEYNAEDPADIIIKLTARYAKEAVIKNQNVGNYVKNAITTTNANGLGWLLNKGLSLLPVSTDDELLEFIGVERSHPSCHALIELIAQLEAPELFEKNVFSDTRSEVQGMIDSAVSNHIARLSSSRNSLSMDSEELERLIKSFQIHTPHCSLFIGAQSLSQQLESLPEALQSGVNSADILLGSTQYMLTNSLVEESIATYQRTLNRINYLSGVAGQINGAIKRKAIDGEKIHLPAAWSELISLPFIGQPVIDVESDLAHLKNQYQTLSNEFDTLISALQKNFDLNFNKALLNRTQHFEAMCRSTKKNALSKPEIVSYRDLLARLTSCLYRGSLVLRRAGIEVLKKHKIFESNSELREHVHERKHFVFVSPLDRKAKKLLRLTDSRPDLLHVIDEILQHDNLENKDRESLWLVRSGYLLAGLPDQLSSSFINLPIITQKGDRRLIDLIQYDQINRDAFVMLVTSAFKSNLSGLQYRANKQSFVVTRTLSPYLGSKLVYVPKDKDWLVPSQMFEGRFADILQSDYMVWKDAGRLCVIDTAKHLSNIKKSVFSSEEVLAFLRELPHRTFIQTEVRGLGVNVDGIAFNNGDIPSLKTFSNCVQVKVSRTNTSLVQTLNRWFEGGKVSPPSIQFERAYYKKDDQIHEDAAKRKIRFQMPATELVHASDDAGWTPSYLLGIDPGEYGMGLSLVSINNGEVLDSGFIHINSLINFASKKSNHQTKVVPRQQYKSPYANYLEQSKDSAAGDIAHILDRLIYKLNALPVFEALSGNSQSAADQVWTKVLSFYTWGDNDAQNSIRKQHWFGASHWDIKGMLRQPPTEKKPKPYIAFPGSQVSSYGNSQRCSCCGRNPIEQLREMAKDTSIKELKIRNSEIQLFDGTIKLFNPDPSTVIERRRHNLGPSRIPVADRTFKNISPSSLEFKELITIVSRSIRHSPEFIAKKRGIGSEYFCAYSDCNSSLNSEANAAANVAQKFQKQLFFEL

SEQ ID NO: 242 - protein, 767 aa, synthetic construct
  REGION 1..767: note = Cas12g1 polypeptide sequence
MAQASSTPAVSPRPRPRYREERTLVRKLLPRPGQSKQEFRENVKKLRKAFLQFNADVSGVCQWAIQFRPRYGKPAEPTETFWKFFLEPETSLPPNDSRSPEFRRLQAFEAAAGINGAAALDDPAFTNELRDSILAVASRPKTKEAQRLFSRLKDYQPAHRMILAKVAAEWIESRYRRAHQNWERNYEEWKKEKQEWEQNHPELTPEIREAFNQIFQQLEVKEKRVRICPAARLLQNKDNCQYAGKNKHSVLCNQFNEFKKNHLQGKAIKFFYKDAEKYLRCGLQSLKPNVQGPFREDWNKYLRYMNLKEETLRGKNGGRLPHCKNLGQECEFNPHTALCKQYQQQLSSRPDLVQHDELYRKWRREYWREPRKPVFRYPSVKRHSIAKIFGENYFQADFKNSVVGLRLDSMPAGQYLEFAFAPWPRNYRPQPGETEISSVHLHFVGTRPRIGFRFRVPHKRSRFDCTQEELDELRSRTFPRKAQDQKFLEAARKRLLETFPGNAEQELRLLAVDLGTDSARAAFFIGKTFQQAFPLKIVKIEKLYEQWPNQKQAGDRRDASSKQPRPGLSRDHVGRHLQKMRAQASEIAQKRQELTGTPAPETTTDQAAKKATLQPFDLRGLTVHTARMIRDWARLNARQIIQLAEENQVDLIVLESLRGFRPPGYENLDQEKKRRVAFFAHGRIRRKVTEKAVERGMRVVTVPYLASSKVCAECRKKQKDNKQWEKNKKRGLFKCEGCGSQAQVDENAARVLGRVFWGEIELPTAIP

SEQ ID NO: 243 - protein, 870 aa, synthetic construct
  REGION 1..870: note = Cas12h1 polypeptide sequence
MKVHEIPRSQLLKIKQYEGSFVEWYRDLQEDRKKFASLLFRWAAFGYAAREDDGATYISPSQALLERRLLLGDAEDVAIKFLDVLFKGGAPSSSCYSLFYEDFALRDKAKYSGAKREFIEGLATMPLDKIIERIRQDEQLSKIPAEEWLILGAEYSPEEIWEQVAPRIVNVDRSLGKQLRERLGIKCRRPHDAGYCKILMEVVARQLRSHNETYHEYLNQTHEMKTKVANNLTNEFDLVCEFAEVLEEKNYGLGWYVLWQGVKQALKEQKKPTKIQIAVDQLRQPKFAGLLTAKWRALKGAYDTWKLKKRLEKRKAFPYMPNWDNDYQIPVGLTGLGVFTLEVKRTEVVVDLKEHGKLFCSHSHYFGDLTAEKHPSRYHLKFRHKLKLRKRDSRVEPTIGPWIEAALREITIQKKPNGVFYLGLPYALSHGIDNFQIAKRFFSAAKPDKEVINGLPSEMVVGAADLNLSNIVAPVKARIGKGLEGPLHALDYGYGELIDGPKILTPDGPRCGELISLKRDIVEIKSAIKEFKACQREGLTMSEETTTWLSEVESPSDSPRCMIQSRIADTSRRLNSFKYQMNKEGYQDLAEALRLLDAMDSYNSLLESYQRMHLSPGEQSPKEAKFDTKRASFRDLLRRRVAHTIVEYFDDCDIVFFEDLDGPSDSDSRNNALVKLLSPRTLLLYIRQALEKRGIGMVEVAKDGTSQNNPISGHVGWRNKQNKSEIYFYEDKELLVMDADEVGAMNILCRGLNHSVCPYSFVTKAPEKKNDEKKEGDYGKRVKRFLKDRYGSSNVRFLVASMGFVTVTTKRPKDALVGKRLYYHGGELVTHDLHNRMKDEIKYLVEKEVLARRVSLSDSTIKSYKSFAHV

SEQ ID NO: 244 - protein, 1093 aa, synthetic construct
  REGION 1..1093: note = Cas12i1 polypeptide sequence
MSNKEKNASETRKAYTTKMIPRSHDRMKLLGNFMDYLMDGTPIFFELWNQFGGGIDRDIISGTANKDKISDDLLLAVNWFKVMPINSKPQGVSPSNLANLFQQYSGSEPDIQAQEYFASNFDTEKHQWKDMRVEYERLLAELQLSRSDMHHDLKLMYKEKCIGLSLSTAHYITSVMFGTGAKNNRQTKHQFYSKVIQLLEESTQINSVEQLASIILKAGDCDSYRKLRIRCSRKGATPSILKIVQDYELGTNHDDEVNVPSLIANLKEKLGRFEYECEWKCMEKIKAFLASKVGPYYLGSYSAMLENALSPIKGMTTKNCKFVLKQIDAKNDIKYENEPFGKIVEGFFDSPYFESDTNVKWVLHPHHIGESNIKTLWEDLNAIHSKYEEDIASLSEDKKEKRIKVYQGDVCQTINTYCEEVGKEAKTPLVQLLRYLYSRKDDIAVDKIIDGITFLSKKHKVEKQKINPVIQKYPSFNFGNNSKLLGKIISPKDKLKHNLKCNRNQVDNYIWIEIKVLNTKTMRWEKHHYALSSTRFLEEVYYPATSENPPDALAARFRTKTNGYEGKPALSAEQIEQIRSAPVGLRKVKKRQMRLEAARQQNLLPRYTWGKDFNINICKRGNNFEVTLATKVKKKKEKNYKVVLGYDANIVRKNTYAAIEAHANGDGVIDYNDLPVKPIESGFVTVESQVRDKSYDQLSYNGVKLLYCKPHVESRRSFLEKYRNGTMKDNRGNNIQIDFMKDFEAIADDETSLYYFNMKYCKLLQSSIRNHSSQAKEYREEIFELLRDGKLSVLKLSSLSNLSFVMFKVAKSLIGTYFGHLLKKPKNSKSDVKAPPITDEDKQKADPEMFALRLALEEKRLNKVKSKKEVIANKIVAKALELRDKYGPVLIKGENISDTTKKGKKSSTNSFLMDWLARGVANKVKEMVMMHQGLEFVEVNPNFTSHQDPFVHKNPENTFRARYSRCTPSELTEKNRKEILSFLSDKPSKRPTNAYYNEGAMAFLATYGLKKNDVLGVSLEKFKQIMANILHQRSEDQLLFPSRGGMFYLATYKLDADATSVNWNGKQFWVCNADLVAAYNVGLVDIQKDFKKK

SEQ ID NO: 245 - protein, 1054 aa, synthetic construct
  REGION 1..1054: note = Cas12i2 polypeptide sequence
MSSAIKSYKSVLRPNERKNQLLKSTIQCLEDGSAFFFKMLQGLFGGITPEIVRFSTEQEKQQQDIALWCAVNWFRPVSQDSLTHTIASDNLVEKFEEYYGGTASDAIKQYFSASIGESYYWNDCRQQYYDLCRELGVEVSDLTHDLEILCREKCLAVATESNQNNSIISVLFGTGEKEDRSVKLRITKKILEAISNLKEIPKNVAPIQEIILNVAKATKETFRQVYAGNLGAPSTLEKFIAKDGQKEFDLKKLQTDLKKVIRGKSKERDWCCQEELRSYVEQNTIQYDLWAWGEMFNKAHTALKIKSTRNYNFAKQRLEQFKEIQSLNNLLVVKKLNDFFDSEFFSGEETYTICVHHLGGKDLSKLYKAWEDDPADPENAIVVLCDDLKNNFKKEPIRNILRYIFTIRQECSAQDILAAAKYNQQLDRYKSQKANPSVLGNQGFTWTNAVILPEKAQRNDRPNSLDLRIWLYLKLRHPDGRWKKHHIPFYDTRFFQEIYAAGNSPVDTCQFRTPRFGYHLPKLTDQTAIRVNKKHVKAAKTEARIRLAIQQGTLPVSNLKITEISATINSKGQVRIPVKFDVGRQKGTLQIGDRFCGYDQNQTASHAYSLWEVVKEGQYHKELGCFVRFISSGDIVSITENRGNQFDQLSYEGLAYPQYADWRKKASKFVSLWQITKKNKKKEIVTVEAKEKFDAICKYQPRLYKFNKEYAYLLRDIVRGKSLVELQQIRQEIFRFIEQDCGVTRLGSLSLSTLETVKAVKGIIYSYFSTALNASKNNPISDEQRKEFDPELFALLEKLELIRTRKKKQKVERIANSLIQTCLENNIKFIRGEGDLSTTNNATKKKANSRSMDWLARGVFNKIRQLAPMHNITLFGCGSLYTSHQDPLVHRNPDKAMKCRWAAIPVKDIGDWVLRKLSQNLRAKNIGTGEYYHQGVKEFLSHYELQDLEEELLKWRSDRKSNIPCWVLQNRLAEKLGNKEAVVYIPVRGGRIYFATHKVATGAVSIVFDQKQVWVCNADHVAAANIALTVKGIGEQSSDEENPDGSRIKLQLTS

SEQ ID NO: 246 - protein, 4 aa, synthetic construct
  REGION 1..4: note = synthetic peptide sequence
GGGS

SEQ ID NO: 247 - protein, 5 aa, synthetic construct
  REGION 1..5: note = synthetic peptide sequence
GGGGS

SEQ ID NO: 248 - protein, 5 aa, synthetic construct
  REGION 1..5: note = synthetic peptide sequence
EAAAK

SEQ ID NO: 249 - protein, 16 aa, synthetic construct
  REGION 1..16: note = synthetic peptide sequence
SGSETPGTSESATPES

SEQ ID NO: 250 - protein, 6 aa, synthetic construct
  REGION 1..6: note = linker peptide sequence
GGSGGS

SEQ ID NO: 251 - protein, 20 aa, synthetic construct
  REGION 1..20: note = synthetic peptide sequence
GSSGSETPGTSESATPESSG

SEQ ID NO: 252 - DNA, 18 bp, synthetic construct
  misc_feature 1..18: note = synthetic oligonucleotide sequence
  source 1..18: mol_type = other DNA
ggaggctctggaggaagc

SEQ ID NO: 253 - DNA, 60 bp, synthetic construct
  misc_feature 1..60: note = synthetic oligonucleotide sequence
  source 1..60: mol_type = other DNA
ggctcttctggatctgaaacacctggcacaagcgagagcgccacccctgagagctctggc

SEQ ID NO: 254 - protein, 1129 aa, Alicyclobacillus acidiphilus
  REGION 1..1129: note = MISC_FEATURE - AacCas12b polypeptide sequence
MAVKSMKVKLRLDNMPEIRAGLWKLHTEVNAGVRYYTEWLSLLRQENLYRRSPNGDGEQECYKTAEECKAELLERLRARQVENGHCGPAGSDDELLQLARQLYELLVPQAIGAKGDAQQIARKFLSPLADKDAVGGLGIAKAGNKPRWVRMREAGEPGWEEEKAKAEARKSTDRTADVLRALADFGLKPLMRVYTDSDMSSVQWKPLRKGQAVRTWDRDMFQQAIERMMSWESWNQRVGEAYAKLVEQKSRFEQKNFVGQEHLVQLVNQLQQDMKEASHGLESKEQTAHYLTGRALRGSDKVFEKWEKLDPDAPFDLYDTEIKNVQRRNTRRFGSHDLFAKLAEPKYQALWREDASFLTRYAVYNSIVRKLNHAKMFATFTLPDATAHPIWTRFDKLGGNLHQYTFLFNEFGEGRHAIRFQKLLTVEDGVAKEVDDVTVPISMSAQLDDLLPRDPHELVALYFQDYGAEQHLAGEFGGAKIQYRRDQLNHLHARRGARDVYLNLSVRVQSQSEARGERRPPYAAVFRLVGDNHRAFVHFDKLSDYLAEHPDDGKLGSEGLLSGLRVMSVDLGLRTSASISVFRVARKDELKPNSEGRVPFCFPIEGNENLVAVHERSQLLKLPGETESKDLRAIREERQRTLRQLRTQLAYLRLLVRCGSEDVGRRERSWAKLIEQPMDANQMTPDWREAFEDELQKLKSLYGICGDREWTEAVYESVRRVWRHMGKQVRDWRKDVRSGERPKIRGYQKDVVGGNSIEQIEYLERQYKFLKSWSFFGKVSGQVIRAEKGSRFAITLREHIDHAKEDRLKKLADRIIMEALGYVYALDDERGKGKWVAKYPPCQLILLEELSEYQFNNDRPPSENNQLMQWSHRGVFQELLNQAQVHDLLVGTMYAAFSSRFDARTGAPGIRCRRVPARCAREQNPEPFPWWLNKFVAEHKLDGCPLRADDLIPTGEGEFFVSPFSAEEGDFHQIHADLNAAQNLQRRLWSDFDISQIRLRCDWGEVDGEPVLIPRTTGKRTADSYGNKVFYTKTGVTYYERERGKKRRKVFAQEELSEEEAELLVEADEAREKSVVLMRDPSGIINRGDWTRQKEFWSMVNQRIEGYLVKQIRSRVRLQESACENTGDI

SEQ ID NO: 255 - protein, 1140 aa, Bacillus hisashii
  REGION 1..1140: note = MISC_FEATURE - BhCas12b polypeptide sequence
MAPKKKRKVGIHGVPAAATRSFILKIEPNEEVKKGLWKTHEVLNHGIAYYMNILKLIRQEAIYEHHEQDPKNPKKVSKAEIQAELWDFVLKMQKCNSFTHEVDKDEVFNILRELYEELVPSSVEKKGEANQLSNKFLYPLVDPNSQSGKGTASSGRKPRWYNLKIAGDPSWEEEKKKWEEDKKKDPLAKILGKLAEYGLIPLFIPYTDSNEPIVKEIKWMEKSRNQSVRRLDKDMFIQALERFLSWESWNLKVKEEYEKVEKEYKTLEERIKEDIQALKALEQYEKERQEQLLRDTLNTNEYRLSKRGLRGWREIIQKWLKMDENEPSEKYLEVFKDYQRKHPREAGDYSVYEFLSKKENHFIWRNHPEYPYLYATFCEIDKKKKDAKQQATFTLADPINHPLWVRFEERSGSNLNKYRILTEQLHTEKLKKKLTVQLDRLIYPTESGGWEEKGKVDIVLLPSRQFYNQIFLDIEEKGKHAFTYKDESIKFPLKGTLGGARVQFDRDHLRRYPHKVESGNVGRIYFNMTVNIEPTESPVSKSLKIHRDDFPKVVNFKPKELTEWIKDSKGKKLKSGIESLEIGLRVMSIDLGQRQAAAASIFEVVDQKPDIEGKLFFPIKGTELYAVHRASFNIKLPGETLVKSREVLRKAREDNLKLMNQKLNFLRNVLHFQQFEDITEREKRVTKWISRQENSDVPLVYQDELIQIRELMYKPYKDWVAFLKQLHKRLEVEIGKEVKHWRKSLSDGRKGLYGISLKNIDEIDRTRKFLLRWSLRPTEPGEVRRLEPGQRFAIDQLNHLNALKEDRLKKMANTIIMHALGYCYDVRKKKWQAKNPACQIILFEDLSNYNPYEERSRFENSKLMKWSRREIPRQVALQGEIYGLQVGEVGAQFSSRFHAKTGSPGIRCSVVTKEKLQDNRFFKNLQREGRLTLDKIAVLKEGDLYPDKGGEKFISLSKDRKCVTTHADINAAQNLQKRFWTRTHGFYKVYCKAYQVDGQTVYIPESKDQKQKIIEEFGEGYFILKDGVYEWVNAGKLKIKKGSSKQSSSELVDSDILKDSFDLASELKGEKLMLYRDPSGNVFPSDKWMAAGVFFGKLERILISKLTNQYSISTIEDDSSKQSMKRPAATKKAGQAKKKK

SEQ ID NO: 256 - protein, 1108 aa, Bacillus thermoamylovorans
  REGION 1..1108: note = MISC_FEATURE - BTCas12b polypeptide sequence
MATRSFILKIEPNEEVKKGLWKTHEVLNHGIAYYMNILKLIRQEAIYEHHEQDPKNPKKVSKAEIQAELWDFVLKMQKCNSFTHEVDKDVVFNILRELYEELVPSSVEKKGEANQLSNKFLYPLVDPNSQSGKGTASSGRKPRWYNLKIAGDPSWEEEKKKWEEDKKKDPLAKILGKLAEYGLIPLFIPFTDSNEPIVKEIKWMEKSRNQSVRRLDKDMFIQALERFLSWESWNLKVKEEYEKVEKEHKTLEERIKEDIQAFKSLEQYEKERQEQLLRDTLNTNEYRLSKRGLRGWREIIQKWLKMDENEPSEKYLEVFKDYQRKHPREAGDYSVYEFLSKKENHFIWRNHPEYPYLYATFCEIDKKKKDAKQQATFTLADPINHPLWVRFEERSGSNLNKYRILTEQLHTEKLKKKLTVQLDRLIYPTESGGWEEKGKVDIVLLPSRQFYNQIFLDIEEKGKHAFTYKDESIKFPLKGTLGGARVQFDRDHLRRYPHKVESGNVGRIYFNMTVNIEPTESPVSKSLKIHRDDFPKFVNFKPKELTEWIKDSKGKKLKSGIESLEIGLRVMSIDLGQRQAAAASIFEVVDQKPDIEGKLFFPIKGTELYAVHRASFNIKLPGETLVKSREVLRKAREDNLKLMNQKLNFLRNVLHFQQFEDITEREKRVTKWISRQENSDVPLVYQDELIQIRELMYKPYKDWVAFLKQLHKRLEVEIGKEVKHWRKSLSDGRKGLYGISLKNIDEIDRTRKFLLRWSLRPTEPGEVRRLEPGQRFAIDQLNHLNALKEDRLKKMANTIIMHALGYCYDVRKKKWQAKNPACQIILFEDLSNYNPYEERSRFENSKLMKWSRREIPRQVALQGEIYGLQVGEVGAQFSSRFHAKTGSPGIRCSVVTKEKLQDNRFFKNLQREGRLTLDKIAVLKEGDLYPDKGGEKFISLSKDRKLVTTHADINAAQNLQKRFWTRTHGFYKVYCKAYQVDGQTVYIPESKDQKQKIIEEFGEGYFILKDGVYEWGNAGKLKIKKGSSKQSSSELVDSDILKDSFDLASELKGEKLMLYRDPSGNVFPSDKWMAAGVFFGKLERILISKLTNQYSISTIEDDSSKQSM

SEQ ID NO: 257 - protein, 1112 aa, Bacillus sp.
  REGION 1..1112: note = MISC_FEATURE - BvCas12b (Bacillus sp. V3-13) polypeptide sequence
MAIRSIKLKMKTNSGTDSIYLRKALWRTHQLINEGIAYYMNLLTLYRQEAIGDKTKEAYQAELINIIRNQQRNNGSSEEHGSDQEILALLRQLYELIIPSSIGESGDANQLGNKFLYPLVDPNSQSGKGTSNAGRKPRWKRLKEEGNPDWELEKKKDEERKAKDPTVKIFDNLNKYGLLPLFPLFTNIQKDIEWLPLGKRQSVRKWDKDMFIQAIERLLSWESWNRRVADEYKQLKEKTESYYKEHLTGGEEWIEKIRKFEKERNMELEKNAFAPNDGYFITSRQIRGWDRVYEKWSKLPESASPEELWKVVAEQQNKMSEGFGDPKVFSFLANRENRDIWRGHSERIYHIAAYNGLQKKLSRTKEQATFTLPDAIEHPLWIRYESPGGTNLNLFKLEEKQKKNYYVTLSKIIWPSEEKWIEKENIEIPLAPSIQFNRQIKLKQHVKGKQEISFSDYSSRISLDGVLGGSRIQFNRKYIKNHKELLGEGDIGPVFFNLVVDVAPLQETRNGRLQSPIGKALKVISSDFSKVIDYKPKELMDWMNTGSASNSFGVASLLEGMRVMSIDMGQRTSASVSIFEVVKELPKDQEQKLFYSINDTELFAIHKRSFLLNLPGEVVTKNNKQQRQERRKKRQFVRSQIRMLANVLRLETKKTPDERKKAIHKLMEIVQSYDSWTASQKEVWEKELNLLTNMAAFNDEIWKESLVELHHRIEPYVGQIVSKWRKGLSEGRKNLAGISMWNIDELEDTRRLLISWSKRSRTPGEANRIETDEPFGSSLLQHIQNVKDDRLKQMANLIIMTALGFKYDKEEKDRYKRWKETYPACQIILFENLNRYLFNLDRSRRENSRLMKWAHRSIPRTVSMQGEMFGLQVGDVRSEYSSRFHAKTGAPGIRCHALTEEDLKAGSNTLKRLIEDGFINESELAYLKKGDIIPSQGGELFVTLSKRYKKDSDNNELTVIHADINAAQNLQKRFWQQNSEVYRVPCQLARMGEDKLYIPKSQTETIKKYFGKGSFVKNNTEQEVYKWEKSEKMKIKTDTTFDLQDLDGFEDISKTIELAQEQQKKYLTMFRDPSGYFFNNETWRPQKEYWSIVNNIIKSCLKKKILSNKVEL

SEQ ID NO: 258 - DNA, 47 bp, synthetic construct
  misc_feature 1..47: note = 5'UTR oligonucleotide sequence
  source 1..47: mol_type = other DNA
gggaaataagagagaaaagaagagtaagaagaaatataagagccacc

SEQ ID NO: 259 - DNA, 101 bp, synthetic construct
  misc_feature 1..101: note = 3'UTR (TriLink standard UTR)polynucleotide sequence
  source 1..101: mol_type = other DNA
gctggagcctcggtggccatgcttcttgccccttgggcctccccccagcccctcctccccttcctgcacccgtacccccgtggtctttgaataaagtctga

SEQ ID NO: 260 - DNA, 3420 bp, Bacillus hisashii
  misc_feature 1..3420: note = bhCas12b (V4) polynucleotide sequence
  source 1..3420: mol_type = genomic DNA
atggccccaaagaagaagcggaaggtcggtatccacggagtcccagcagccgccaccagatccttcatcctgaagatcgagcccaacgaggaagtgaagaaaggcctctggaaaacccacgaggtgctgaaccacggaatcgcctactacatgaatatcctgaagctgatccggcaagaggccatctacgagcaccacgagcaggaccccaagaatcccaagaaggtgtccaaggccgagatccaggccgagctgtgggatttcgtgctgaagatgcagaagtgcaacagcttcacacacgaggtggacaaggacgaggtgttcaacatcctgagagagctgtacgaggaactggtgcccagcagcgtggaaaagaagggcgaagccaaccagctgagcaacaagtttctgtaccctctggtggaccccaacagccagtctggaaagggaacagccagcagcggcagaaagcccagatggtacaacctgaagattgccggcgatccctcctgggaagaagagaagaagaagtgggaagaagataagaaaaaggacccgctggccaagatcctgggcaagctggctgagtacggactgatccctctgttcatcccctacaccgacagcaacgagcccatcgtgaaagaaatcaagtggatggaaaagtcccggaaccagagcgtgcggcggctggataaggacatgttcattcaggccctggaacggttcctgagctgggagagctggaacctgaaagtgaaagaggaatacgagaaggtcgagaaagagtacaagaccctggaagagaggatcaaagaggacatccaggctctgaaggctctggaacagtatgagaaagagcggcaagaacagctgctgcgggacaccctgaacaccaacgagtaccggctgagcaagagaggccttagaggctggcgggaaatcatccagaaatggctgaaaatggacgagaacgagccctccgagaagtacctggaagtgttcaaggactaccagcggaagcaccctagagaggccggcgattacagcgtgtacgagttcctgtccaagaaagagaaccacttcatctggcggaatcaccctgagtacccctacctgtacgccaccttctgcgagatcgacaagaaaaagaaggacgccaagcagcaggccaccttcacactggccgatcctatcaatcaccctctgtgggtccgattcgaggaaagaagcggcagcaacctgaacaagtacagaatcctgaccgagcagctgcacaccgagaagctgaagaaaaagctgacagtgcagctggaccggctgatctaccctacagaatctggcggctgggaagagaagggcaaagtggacattgtgctgctgcccagccggcagttctacaaccagatcttcctggacatcgaggaaaagggcaagcacgccttcacctacaaggatgagagcatcaagttccctctgaagggcacactcggcggagccagagtgcagttcgacagagatcacctgagaagataccctcacaaggtggaaagcggcaacgtgggcagaatctacttcaacatgaccgtgaacatcgagcctacagagtccccagtgtccaagtctctgaagatccaccgggacgacttccccaaggtggtcaacttcaagcccaaagaactgaccgagtggatcaaggacagcaagggcaagaaactgaagtccggcatcgagtccctggaaatcggcctgagagtgatgagcatcgacctgggacagagacaggccgctgccgcctctattttcgaggtggtggatcagaagcccgacatcgaaggcaagctgtttttcccaatcaagggcaccgagctgtatgccgtgcacagagccagcttcaacatcaagctgcccggcgagacactggtcaagagcagagaagtgctgcggaaggccagagaggacaatctgaaactgatgaaccagaagctcaacttcctgcggaacgtgctgcacttccagcagttcgaggacatcaccgagagagagaagcgggtcaccaagtggatcagcagacaagagaacagcgacgtgcccctggtgtaccaggatgagctgatccagatccgcgagctgatgtacaagccttacaaggactgggtcgccttcctgaagcagctccacaagagactggaagtcgagatcggcaaagaagtgaagcactggcggaagtccctgagcgacggaagaaagggcctgtacggcatctccctgaagaacatcgacgagatcgatcggacccggaagttcctgctgagatggtccctgaggcctaccgaacctggcgaagtgcgtagactggaacccggccagagattcgccatcgaccagctgaatcacctgaacgccctgaaagaagatcggctgaagaagatggccaacaccatcatcatgcacgccctgggctactgctacgacgtgcggaagaagaaatggcaggctaagaaccccgcctgccagatcatcctgttcgaggatctgagcaactacaacccctacgaggaaaggtcccgcttcgagaacagcaagctcatgaagtggtccagacgcgagatccccagacaggttgcactgcagggcgagatctatggcctgcaagtgggagaagtgggcgctcagttcagcagcagattccacgccaagacaggcagccctggcatcagatgtagcgtcgtgaccaaagagaagctgcaggacaatcggttcttcaagaatctgcagagagagggcagactgaccctggacaaaatcgccgtgctgaaagagggcgatctgtacccagacaaaggcggcgagaagttcatcagcctgagcaaggatcggaagtgcgtgaccacacacgccgacatcaacgccgctcagaacctgcagaagcggttctggacaagaacccacggcttctacaaggtgtactgcaaggcctaccaggtggacggccagaccgtgtacatccctgagagcaaggaccagaagcagaagatcatcgaagagttcggcgagggctacttcattctgaaggacggggtgtacgaatgggtcaacgccggcaagctgaaaatcaagaagggcagctccaagcagagcagcagcgagctggtggatagcgacatcctgaaagacagcttcgacctggcctccgagctgaaaggcgaaaagctgatgctgtacagggaccccagcggcaatgtgttccccagcgacaaatggatggccgctggcgtgttcttcggaaagctggaacgcatcctgatcagcaagctgaccaaccagtactccatcagcaccatcgaggacgacagcagcaagcagtctatgaaaaggccggcggccacgaaaaaggccggccaggcaaaaaagaaaaag

SEQ ID NO: 261 - protein, 17 aa, synthetic construct
  REGION 1..17: note = synthetic peptide sequence
MAPKKKRKVGIHGVPAA

SEQ ID NO: 262 - DNA, 51 bp, synthetic construct
  misc_feature 1..51: note = synthetic oligonucleotide sequence
  source 1..51: mol_type = other DNA
atggccccaaagaagaagcggaaggtcggtatccacggagtcccagcagcc

SEQ ID NO: 263 - protein, 1554 aa, synthetic construct
  REGION 1..1554: note = 101 Cas9 TadAins 1015 polypeptide sequence
MDKKYSIGLAIGTNSVGWAVITDEYKVPSKKFKVLGNTDRHSIKKNLIGALLFDSGETAEATRLKRTARRRYTRRKNRICYLQEIFSNEMAKVDDSFFHRLEESFLVEEDKKHERHPIFGNIVDEVAYHEKYPTIYHLRKKLVDSTDKADLRLIYLALAHMIKFRGHFLIEGDLNPDNSDVDKLFIQLVQTYNQLFEENPINASGVDAKAILSARLSKSRRLENLIAQLPGEKKNGLFGNLIALSLGLTPNFKSNFDLAEDAKLQLSKDTYDDDLDNLLAQIGDQYADLFLAAKNLSDAILLSDILRVNTEITKAPLSASMIKRYDEHHQDLTLLKALVRQQLPEKYKEIFFDQSKNGYAGYIDGGASQEEFYKFIKPILEKMDGTEELLVKLNREDLLRKQRTFDNGSIPHQIHLGELHAILRRQEDFYPFLKDNREKIEKILTFRIPYYVGPLARGNSRFAWMTRKSEETITPWNFEEVVDKGASAQSFIERMTNFDKNLPNEKVLPKHSLLYEYFTVYNELTKVKYVTEGMRKPAFLSGEQKKAIVDLLFKTNRKVTVKQLKEDYFKKIECFDSVEISGVEDRFNASLGTYHDLLKIIKDKDFLDNEENEDILEDIVLTLTLFEDREMIEERLKTYAHLFDDKVMKQLKRRRYTGWGRLSRKLINGIRDKQSGKTILDFLKSDGFANRNFMQLIHDDSLTFKEDIQKAQVSGQGDSLHEHIANLAGSPAIKKGILQTVKVVDELVKVMGRHKPENIVIEMARENQTTQKGQKNSRERMKRIEEGIKELGSQILKEHPVENTQLQNEKLYLYYLQNGRDMYVDQELDINRLSDYDVDHIVPQSFLKDDSIDNKVLTRSDKNRGKSDNVPSEEVVKKMKNYWRQLLNAKLITQRKFDNLTKAERGGLSELDKAGFIKRQLVETRQITKHVAQILDSRMNTKYDENDKLIREVKVITLKSKLVSDFRKDFQFYKVREINNYHHAHDAYLNAVVGTALIKKYPKLESEFVYGDYKVGSSGSETPGTSESATPESSGSEVEFSHEYWMRHALTLAKRARDEREVPVGAVLVLNNRVIGEGWNRAIGLHDPTAHAEIMALRQGGLVMQNYRLIDATLYVTFEPCVMCAGAMIHSRIGRVVFGVRNAKTGAAGSLMDVLHYPGMNHRVEITEGILADECAALLCYFFRMPRQVFNAQKKAQSSTDYDVRKMIAKSEQEIGKATAKYFFYSNIMNFFKTEITLANGEIRKRPLIETNGETGEIVWDKGRDFATVRKVLSMPQVNIVKKTEVQTGGFSKESILPKRNSDKLIARKKDWDPKKYGGFDSPTVAYSVLVVAKVEKGKSKKLKSVKELLGITIMERSSFEKNPIDFLEAKGYKEVKKDLIIKLPKYSLFELENGRKRMLASAGELQKGNELALPSKYVNFLYLASHYEKLKGSPEDNEQKQLFVEQHKHYLDEIIEQISEFSKRVILADANLDKVLSAYNKHRDKPIREQAENIIHLFTLTNLGAPAAFKYFDTTIDRKRYTSTKEVLDATLIHQSITGLYETRIDLSQLGGD

SEQ ID NO: 264 - protein, 1554 aa, synthetic construct
  REGION 1..1554: note = 102 Cas9 TadAins 1022 polypeptide sequence
MDKKYSIGLAIGTNSVGWAVITDEYKVPSKKFKVLGNTDRHSIKKNLIGALLFDSGETAEATRLKRTARRRYTRRKNRICYLQEIFSNEMAKVDDSFFHRLEESFLVEEDKKHERHPIFGNIVDEVAYHEKYPTIYHLRKKLVDSTDKADLRLIYLALAHMIKFRGHFLIEGDLNPDNSDVDKLFIQLVQTYNQLFEENPINASGVDAKAILSARLSKSRRLENLIAQLPGEKKNGLFGNLIALSLGLTPNFKSNFDLAEDAKLQLSKDTYDDDLDNLLAQIGDQYADLFLAAKNLSDAILLSDILRVNTEITKAPLSASMIKRYDEHHQDLTLLKALVRQQLPEKYKEIFFDQSKNGYAGYIDGGASQEEFYKFIKPILEKMDGTEELLVKLNREDLLRKQRTFDNGSIPHQIHLGELHAILRRQEDFYPFLKDNREKIEKILTFRIPYYVGPLARGNSRFAWMTRKSEETITPWNFEEVVDKGASAQSFIERMTNFDKNLPNEKVLPKHSLLYEYFTVYNELTKVKYVTEGMRKPAFLSGEQKKAIVDLLFKTNRKVTVKQLKEDYFKKIECFDSVEISGVEDRFNASLGTYHDLLKIIKDKDFLDNEENEDILEDIVLTLTLFEDREMIEERLKTYAHLFDDKVMKQLKRRRYTGWGRLSRKLINGIRDKQSGKTILDFLKSDGFANRNFMQLIHDDSLTFKEDIQKAQVSGQGDSLHEHIANLAGSPAIKKGILQTVKVVDELVKVMGRHKPENIVIEMARENQTTQKGQKNSRERMKRIEEGIKELGSQILKEHPVENTQLQNEKLYLYYLQNGRDMYVDQELDINRLSDYDVDHIVPQSFLKDDSIDNKVLTRSDKNRGKSDNVPSEEVVKKMKNYWRQLLNAKLITQRKFDNLTKAERGGLSELDKAGFIKRQLVETRQITKHVAQILDSRMNTKYDENDKLIREVKVITLKSKLVSDFRKDFQFYKVREINNYHHAHDAYLNAVVGTALIKKYPKLESEFVYGDYKVYDVRKMIGSSGSETPGTSESATPESSGSEVEFSHEYWMRHALTLAKRARDEREVPVGAVLVLNNRVIGEGWNRAIGLHDPTAHAEIMALRQGGLVMQNYRLIDATLYVTFEPCVMCAGAMIHSRIGRVVFGVRNAKTGAAGSLMDVLHYPGMNHRVEITEGILADECAALLCYFFRMPRQVFNAQKKAQSSTDAKSEQEIGKATAKYFFYSNIMNFFKTEITLANGEIRKRPLIETNGETGEIVWDKGRDFATVRKVLSMPQVNIVKKTEVQTGGFSKESILPKRNSDKLIARKKDWDPKKYGGFDSPTVAYSVLVVAKVEKGKSKKLKSVKELLGITIMERSSFEKNPIDFLEAKGYKEVKKDLIIKLPKYSLFELENGRKRMLASAGELQKGNELALPSKYVNFLYLASHYEKLKGSPEDNEQKQLFVEQHKHYLDEIIEQISEFSKRVILADANLDKVLSAYNKHRDKPIREQAENIIHLFTLTNLGAPAAFKYFDTTIDRKRYTSTKEVLDATLIHQSITGLYETRIDLSQLGGD

SEQ ID NO: 265 - protein, 1554 aa, synthetic construct
  REGION 1..1554: note = 103 Cas9 TadAins 1029 polypeptide sequence
MDKKYSIGLAIGTNSVGWAVITDEYKVPSKKFKVLGNTDRHSIKKNLIGALLFDSGETAEATRLKRTARRRYTRRKNRICYLQEIFSNEMAKVDDSFFHRLEESFLVEEDKKHERHPIFGNIVDEVAYHEKYPTIYHLRKKLVDSTDKADLRLIYLALAHMIKFRGHFLIEGDLNPDNSDVDKLFIQLVQTYNQLFEENPINASGVDAKAILSARLSKSRRLENLIAQLPGEKKNGLFGNLIALSLGLTPNFKSNFDLAEDAKLQLSKDTYDDDLDNLLAQIGDQYADLFLAAKNLSDAILLSDILRVNTEITKAPLSASMIKRYDEHHQDLTLLKALVRQQLPEKYKEIFFDQSKNGYAGYIDGGASQEEFYKFIKPILEKMDGTEELLVKLNREDLLRKQRTFDNGSIPHQIHLGELHAILRRQEDFYPFLKDNREKIEKILTFRIPYYVGPLARGNSRFAWMTRKSEETITPWNFEEVVDKGASAQSFIERMTNFDKNLPNEKVLPKHSLLYEYFTVYNELTKVKYVTEGMRKPAFLSGEQKKAIVDLLFKTNRKVTVKQLKEDYFKKIECFDSVEISGVEDRFNASLGTYHDLLKIIKDKDFLDNEENEDILEDIVLTLTLFEDREMIEERLKTYAHLFDDKVMKQLKRRRYTGWGRLSRKLINGIRDKQSGKTILDFLKSDGFANRNFMQLIHDDSLTFKEDIQKAQVSGQGDSLHEHIANLAGSPAIKKGILQTVKVVDELVKVMGRHKPENIVIEMARENQTTQKGQKNSRERMKRIEEGIKELGSQILKEHPVENTQLQNEKLYLYYLQNGRDMYVDQELDINRLSDYDVDHIVPQSFLKDDSIDNKVLTRSDKNRGKSDNVPSEEVVKKMKNYWRQLLNAKLITQRKFDNLTKAERGGLSELDKAGFIKRQLVETRQITKHVAQILDSRMNTKYDENDKLIREVKVITLKSKLVSDFRKDFQFYKVREINNYHHAHDAYLNAVVGTALIKKYPKLESEFVYGDYKVYDVRKMIAKSEQEIGSSGSETPGTSESATPESSGSEVEFSHEYWMRHALTLAKRARDEREVPVGAVLVLNNRVIGEGWNRAIGLHDPTAHAEIMALRQGGLVMQNYRLIDATLYVTFEPCVMCAGAMIHSRIGRVVFGVRNAKTGAAGSLMDVLHYPGMNHRVEITEGILADECAALLCYFFRMPRQVFNAQKKAQSSTDGKATAKYFFYSNIMNFFKTEITLANGEIRKRPLIETNGETGEIVWDKGRDFATVRKVLSMPQVNIVKKTEVQTGGFSKESILPKRNSDKLIARKKDWDPKKYGGFDSPTVAYSVLVVAKVEKGKSKKLKSVKELLGITIMERSSFEKNPIDFLEAKGYKEVKKDLIIKLPKYSLFELENGRKRMLASAGELQKGNELALPSKYVNFLYLASHYEKLKGSPEDNEQKQLFVEQHKHYLDEIIEQISEFSKRVILADANLDKVLSAYNKHRDKPIREQAENIIHLFTLTNLGAPAAFKYFDTTIDRKRYTSTKEVLDATLIHQSITGLYETRIDLSQLGGD

SEQ ID NO: 266 - protein, 1554 aa, synthetic construct
  REGION 1..1554: note = 103 Cas9 TadAins 1040 polypeptide sequence
MDKKYSIGLAIGTNSVGWAVITDEYKVPSKKFKVLGNTDRHSIKKNLIGALLFDSGETAEATRLKRTARRRYTRRKNRICYLQEIFSNEMAKVDDSFFHRLEESFLVEEDKKHERHPIFGNIVDEVAYHEKYPTIYHLRKKLVDSTDKADLRLIYLALAHMIKFRGHFLIEGDLNPDNSDVDKLFIQLVQTYNQLFEENPINASGVDAKAILSARLSKSRRLENLIAQLPGEKKNGLFGNLIALSLGLTPNFKSNFDLAEDAKLQLSKDTYDDDLDNLLAQIGDQYADLFLAAKNLSDAILLSDILRVNTEITKAPLSASMIKRYDEHHQDLTLLKALVRQQLPEKYKEIFFDQSKNGYAGYIDGGASQEEFYKFIKPILEKMDGTEELLVKLNREDLLRKQRTFDNGSIPHQIHLGELHAILRRQEDFYPFLKDNREKIEKILTFRIPYYVGPLARGNSRFAWMTRKSEETITPWNFEEVVDKGASAQSFIERMTNFDKNLPNEKVLPKHSLLYEYFTVYNELTKVKYVTEGMRKPAFLSGEQKKAIVDLLFKTNRKVTVKQLKEDYFKKIECFDSVEISGVEDRFNASLGTYHDLLKIIKDKDFLDNEENEDILEDIVLTLTLFEDREMIEERLKTYAHLFDDKVMKQLKRRRYTGWGRLSRKLINGIRDKQSGKTILDFLKSDGFANRNFMQLIHDDSLTFKEDIQKAQVSGQGDSLHEHIANLAGSPAIKKGILQTVKVVDELVKVMGRHKPENIVIEMARENQTTQKGQKNSRERMKRIEEGIKELGSQILKEHPVENTQLQNEKLYLYYLQNGRDMYVDQELDINRLSDYDVDHIVPQSFLKDDSIDNKVLTRSDKNRGKSDNVPSEEVVKKMKNYWRQLLNAKLITQRKFDNLTKAERGGLSELDKAGFIKRQLVETRQITKHVAQILDSRMNTKYDENDKLIREVKVITLKSKLVSDFRKDFQFYKVREINNYHHAHDAYLNAVVGTALIKKYPKLESEFVYGDYKVYDVRKMIAKSEQEIGKATAKYFFYSGSSGSETPGTSESATPESSGSEVEFSHEYWMRHALTLAKRARDEREVPVGAVLVLNNRVIGEGWNRAIGLHDPTAHAEIMALRQGGLVMQNYRLIDATLYVTFEPCVMCAGAMIHSRIGRVVFGVRNAKTGAAGSLMDVLHYPGMNHRVEITEGILADECAALLCYFFRMPRQVFNAQKKAQSSTDNIMNFFKTEITLANGEIRKRPLIETNGETGEIVWDKGRDFATVRKVLSMPQVNIVKKTEVQTGGFSKESILPKRNSDKLIARKKDWDPKKYGGFDSPTVAYSVLVVAKVEKGKSKKLKSVKELLGITIMERSSFEKNPIDFLEAKGYKEVKKDLIIKLPKYSLFELENGRKRMLASAGELQKGNELALPSKYVNFLYLASHYEKLKGSPEDNEQKQLFVEQHKHYLDEIIEQISEFSKRVILADANLDKVLSAYNKHRDKPIREQAENIIHLFTLTNLGAPAAFKYFDTTIDRKRYTSTKEVLDATLIHQSITGLYETRIDLSQLGGD

SEQ ID NO: 267 - protein, 1554 aa, synthetic construct
  REGION 1..1554: note = 105 Cas9 TadAins 1068 polypeptide sequence
MDKKYSIGLAIGTNSVGWAVITDEYKVPSKKFKVLGNTDRHSIKKNLIGALLFDSGETAEATRLKRTARRRYTRRKNRICYLQEIFSNEMAKVDDSFFHRLEESFLVEEDKKHERHPIFGNIVDEVAYHEKYPTIYHLRKKLVDSTDKADLRLIYLALAHMIKFRGHFLIEGDLNPDNSDVDKLFIQLVQTYNQLFEENPINASGVDAKAILSARLSKSRRLENLIAQLPGEKKNGLFGNLIALSLGLTPNFKSNFDLAEDAKLQLSKDTYDDDLDNLLAQIGDQYADLFLAAKNLSDAILLSDILRVNTEITKAPLSASMIKRYDEHHQDLTLLKALVRQQLPEKYKEIFFDQSKNGYAGYIDGGASQEEFYKFIKPILEKMDGTEELLVKLNREDLLRKQRTFDNGSIPHQIHLGELHAILRRQEDFYPFLKDNREKIEKILTFRIPYYVGPLARGNSRFAWMTRKSEETITPWNFEEVVDKGASAQSFIERMTNFDKNLPNEKVLPKHSLLYEYFTVYNELTKVKYVTEGMRKPAFLSGEQKKAIVDLLFKTNRKVTVKQLKEDYFKKIECFDSVEISGVEDRFNASLGTYHDLLKIIKDKDFLDNEENEDILEDIVLTLTLFEDREMIEERLKTYAHLFDDKVMKQLKRRRYTGWGRLSRKLINGIRDKQSGKTILDFLKSDGFANRNFMQLIHDDSLTFKEDIQKAQVSGQGDSLHEHIANLAGSPAIKKGILQTVKVVDELVKVMGRHKPENIVIEMARENQTTQKGQKNSRERMKRIEEGIKELGSQILKEHPVENTQLQNEKLYLYYLQNGRDMYVDQELDINRLSDYDVDHIVPQSFLKDDSIDNKVLTRSDKNRGKSDNVPSEEVVKKMKNYWRQLLNAKLITQRKFDNLTKAERGGLSELDKAGFIKRQLVETRQITKHVAQILDSRMNTKYDENDKLIREVKVITLKSKLVSDFRKDFQFYKVREINNYHHAHDAYLNAVVGTALIKKYPKLESEFVYGDYKVYDVRKMIAKSEQEIGKATAKYFFYSNIMNFFKTEITLANGEIRKRPLIETNGEGSSGSETPGTSESATPESSGSEVEFSHEYWMRHALTLAKRARDEREVPVGAVLVLNNRVIGEGWNRAIGLHDPTAHAEIMALRQGGLVMQNYRLIDATLYVTFEPCVMCAGAMIHSRIGRVVFGVRNAKTGAAGSLMDVLHYPGMNHRVEITEGILADECAALLCYFFRMPRQVFNAQKKAQSSTDTGEIVWDKGRDFATVRKVLSMPQVNIVKKTEVQTGGFSKESILPKRNSDKLIARKKDWDPKKYGGFDSPTVAYSVLVVAKVEKGKSKKLKSVKELLGITIMERSSFEKNPIDFLEAKGYKEVKKDLIIKLPKYSLFELENGRKRMLASAGELQKGNELALPSKYVNFLYLASHYEKLKGSPEDNEQKQLFVEQHKHYLDEIIEQISEFSKRVILADANLDKVLSAYNKHRDKPIREQAENIIHLFTLTNLGAPAAFKYFDTTIDRKRYTSTKEVLDATLIHQSITGLYETRIDLSQLGGD

SEQ ID NO: 268 - protein, 1554 aa, synthetic construct
  REGION 1..1554: note = 106 Cas9 TadAins 1247 polypeptide sequence
MDKKYSIGLAIGTNSVGWAVITDEYKVPSKKFKVLGNTDRHSIKKNLIGALLFDSGETAEATRLKRTARRRYTRRKNRICYLQEIFSNEMAKVDDSFFHRLEESFLVEEDKKHERHPIFGNIVDEVAYHEKYPTIYHLRKKLVDSTDKADLRLIYLALAHMIKFRGHFLIEGDLNPDNSDVDKLFIQLVQTYNQLFEENPINASGVDAKAILSARLSKSRRLENLIAQLPGEKKNGLFGNLIALSLGLTPNFKSNFDLAEDAKLQLSKDTYDDDLDNLLAQIGDQYADLFLAAKNLSDAILLSDILRVNTEITKAPLSASMIKRYDEHHQDLTLLKALVRQQLPEKYKEIFFDQSKNGYAGYIDGGASQEEFYKFIKPILEKMDGTEELLVKLNREDLLRKQRTFDNGSIPHQIHLGELHAILRRQEDFYPFLKDNREKIEKILTFRIPYYVGPLARGNSRFAWMTRKSEETITPWNFEEVVDKGASAQSFIERMTNFDKNLPNEKVLPKHSLLYEYFTVYNELTKVKYVTEGMRKPAFLSGEQKKAIVDLLFKTNRKVTVKQLKEDYFKKIECFDSVEISGVEDRFNASLGTYHDLLKIIKDKDFLDNEENEDILEDIVLTLTLFEDREMIEERLKTYAHLFDDKVMKQLKRRRYTGWGRLSRKLINGIRDKQSGKTILDFLKSDGFANRNFMQLIHDDSLTFKEDIQKAQVSGQGDSLHEHIANLAGSPAIKKGILQTVKVVDELVKVMGRHKPENIVIEMARENQTTQKGQKNSRERMKRIEEGIKELGSQILKEHPVENTQLQNEKLYLYYLQNGRDMYVDQELDINRLSDYDVDHIVPQSFLKDDSIDNKVLTRSDKNRGKSDNVPSEEVVKKMKNYWRQLLNAKLITQRKFDNLTKAERGGLSELDKAGFIKRQLVETRQITKHVAQILDSRMNTKYDENDKLIREVKVITLKSKLVSDFRKDFQFYKVREINNYHHAHDAYLNAVVGTALIKKYPKLESEFVYGDYKVYDVRKMIAKSEQEIGKATAKYFFYSNIMNFFKTEITLANGEIRKRPLIETNGETGEIVWDKGRDFATVRKVLSMPQVNIVKKTEVQTGGFSKESILPKRNSDKLIARKKDWDPKKYGGFDSPTVAYSVLVVAKVEKGKSKKLKSVKELLGITIMERSSFEKNPIDFLEAKGYKEVKKDLIIKLPKYSLFELENGRKRMLASAGELQKGNELALPSKYVNFLYLASHYEKLKGGSSGSETPGTSESATPESSGSEVEFSHEYWMRHALTLAKRARDEREVPVGAVLVLNNRVIGEGWNRAIGLHDPTAHAEIMALRQGGLVMQNYRLIDATLYVTFEPCVMCAGAMIHSRIGRVVFGVRNAKTGAAGSLMDVLHYPGMNHRVEITEGILADECAALLCYFFRMPRQVFNAQKKAQSSTDSPEDNEQKQLFVEQHKHYLDEIIEQISEFSKRVILADANLDKVLSAYNKHRDKPIREQAENIIHLFTLTNLGAPAAFKYFDTTIDRKRYTSTKEVLDATLIHQSITGLYETRIDLSQLGGD

SEQ ID NO: 269 - protein, 1554 aa, synthetic construct
  REGION 1..1554: note = 107 Cas9 TadAins 1054 polypeptide sequence
MDKKYSIGLAIGTNSVGWAVITDEYKVPSKKFKVLGNTDRHSIKKNLIGALLFDSGETAEATRLKRTARRRYTRRKNRICYLQEIFSNEMAKVDDSFFHRLEESFLVEEDKKHERHPIFGNIVDEVAYHEKYPTIYHLRKKLVDSTDKADLRLIYLALAHMIKFRGHFLIEGDLNPDNSDVDKLFIQLVQTYNQLFEENPINASGVDAKAILSARLSKSRRLENLIAQLPGEKKNGLFGNLIALSLGLTPNFKSNFDLAEDAKLQLSKDTYDDDLDNLLAQIGDQYADLFLAAKNLSDAILLSDILRVNTEITKAPLSASMIKRYDEHHQDLTLLKALVRQQLPEKYKEIFFDQSKNGYAGYIDGGASQEEFYKFIKPILEKMDGTEELLVKLNREDLLRKQRTFDNGSIPHQIHLGELHAILRRQEDFYPFLKDNREKIEKILTFRIPYYVGPLARGNSRFAWMTRKSEETITPWNFEEVVDKGASAQSFIERMTNFDKNLPNEKVLPKHSLLYEYFTVYNELTKVKYVTEGMRKPAFLSGEQKKAIVDLLFKTNRKVTVKQLKEDYFKKIECFDSVEISGVEDRFNASLGTYHDLLKIIKDKDFLDNEENEDILEDIVLTLTLFEDREMIEERLKTYAHLFDDKVMKQLKRRRYTGWGRLSRKLINGIRDKQSGKTILDFLKSDGFANRNFMQLIHDDSLTFKEDIQKAQVSGQGDSLHEHIANLAGSPAIKKGILQTVKVVDELVKVMGRHKPENIVIEMARENQTTQKGQKNSRERMKRIEEGIKELGSQILKEHPVENTQLQNEKLYLYYLQNGRDMYVDQELDINRLSDYDVDHIVPQSFLKDDSIDNKVLTRSDKNRGKSDNVPSEEVVKKMKNYWRQLLNAKLITQRKFDNLTKAERGGLSELDKAGFIKRQLVETRQITKHVAQILDSRMNTKYDENDKLIREVKVITLKSKLVSDFRKDFQFYKVREINNYHHAHDAYLNAVVGTALIKKYPKLESEFVYGDYKVYDVRKMIAKSEQEIGKATAKYFFYSNIMNFFKTEITLANGSSGSETPGTSESATPESSGSEVEFSHEYWMRHALTLAKRARDEREVPVGAVLVLNNRVIGEGWNRAIGLHDPTAHAEIMALRQGGLVMQNYRLIDATLYVTFEPCVMCAGAMIHSRIGRVVFGVRNAKTGAAGSLMDVLHYPGMNHRVEITEGILADECAALLCYFFRMPRQVFNAQKKAQSSTDGEIRKRPLIETNGETGEIVWDKGRDFATVRKVLSMPQVNIVKKTEVQTGGFSKESILPKRNSDKLIARKKDWDPKKYGGFDSPTVAYSVLVVAKVEKGKSKKLKSVKELLGITIMERSSFEKNPIDFLEAKGYKEVKKDLIIKLPKYSLFELENGRKRMLASAGELQKGNELALPSKYVNFLYLASHYEKLKGSPEDNEQKQLFVEQHKHYLDEIIEQISEFSKRVILADANLDKVLSAYNKHRDKPIREQAENIIHLFTLTNLGAPAAFKYFDTTIDRKRYTSTKEVLDATLIHQSITGLYETRIDLSQLGGD

SEQ ID NO: 270 - protein, 1554 aa, synthetic construct
  REGION 1..1554: note = 108 Cas9 TadAins 1026 polypeptide sequence
MDKKYSIGLAIGTNSVGWAVITDEYKVPSKKFKVLGNTDRHSIKKNLIGALLFDSGETAEATRLKRTARRRYTRRKNRICYLQEIFSNEMAKVDDSFFHRLEESFLVEEDKKHERHPIFGNIVDEVAYHEKYPTIYHLRKKLVDSTDKADLRLIYLALAHMIKFRGHFLIEGDLNPDNSDVDKLFIQLVQTYNQLFEENPINASGVDAKAILSARLSKSRRLENLIAQLPGEKKNGLFGNLIALSLGLTPNFKSNFDLAEDAKLQLSKDTYDDDLDNLLAQIGDQYADLFLAAKNLSDAILLSDILRVNTEITKAPLSASMIKRYDEHHQDLTLLKALVRQQLPEKYKEIFFDQSKNGYAGYIDGGASQEEFYKFIKPILEKMDGTEELLVKLNREDLLRKQRTFDNGSIPHQIHLGELHAILRRQEDFYPFLKDNREKIEKILTFRIPYYVGPLARGNSRFAWMTRKSEETITPWNFEEVVDKGASAQSFIERMTNFDKNLPNEKVLPKHSLLYEYFTVYNELTKVKYVTEGMRKPAFLSGEQKKAIVDLLFKTNRKVTVKQLKEDYFKKIECFDSVEISGVEDRFNASLGTYHDLLKIIKDKDFLDNEENEDILEDIVLTLTLFEDREMIEERLKTYAHLFDDKVMKQLKRRRYTGWGRLSRKLINGIRDKQSGKTILDFLKSDGFANRNFMQLIHDDSLTFKEDIQKAQVSGQGDSLHEHIANLAGSPAIKKGILQTVKVVDELVKVMGRHKPENIVIEMARENQTTQKGQKNSRERMKRIEEGIKELGSQILKEHPVENTQLQNEKLYLYYLQNGRDMYVDQELDINRLSDYDVDHIVPQSFLKDDSIDNKVLTRSDKNRGKSDNVPSEEVVKKMKNYWRQLLNAKLITQRKFDNLTKAERGGLSELDKAGFIKRQLVETRQITKHVAQILDSRMNTKYDENDKLIREVKVITLKSKLVSDFRKDFQFYKVREINNYHHAHDAYLNAVVGTALIKKYPKLESEFVYGDYKVYDVRKMIAKSEGSSGSETPGTSESATPESSGSEVEFSHEYWMRHALTLAKRARDEREVPVGAVLVLNNRVIGEGWNRAIGLHDPTAHAEIMALRQGGLVMQNYRLIDATLYVTFEPCVMCAGAMIHSRIGRVVFGVRNAKTGAAGSLMDVLHYPGMNHRVEITEGILADECAALLCYFFRMPRQVFNAQKKAQSSTDQEIGKATAKYFFYSNIMNFFKTEITLANGEIRKRPLIETNGETGEIVWDKGRDFATVRKVLSMPQVNIVKKTEVQTGGFSKESILPKRNSDKLIARKKDWDPKKYGGFDSPTVAYSVLVVAKVEKGKSKKLKSVKELLGITIMERSSFEKNPIDFLEAKGYKEVKKDLIIKLPKYSLFELENGRKRMLASAGELQKGNELALPSKYVNFLYLASHYEKLKGSPEDNEQKQLFVEQHKHYLDEIIEQISEFSKRVILADANLDKVLSAYNKHRDKPIREQAENIIHLFTLTNLGAPAAFKYFDTTIDRKRYTSTKEVLDATLIHQSITGLYETRIDLSQLGGD

SEQ ID NO: 271 - protein, 1540 aa, synthetic construct
  REGION 1..1540: note = 109 Cas9 TadAins 768 polypeptide sequence
MDKKYSIGLAIGTNSVGWAVITDEYKVPSKKFKVLGNTDRHSIKKNLIGALLFDSGETAEATRLKRTARRRYTRRKNRICYLQEIFSNEMAKVDDSFFHRLEESFLVEEDKKHERHPIFGNIVDEVAYHEKYPTIYHLRKKLVDSTDKADLRLIYLALAHMIKFRGHFLIEGDLNPDNSDVDKLFIQLVQTYNQLFEENPINASGVDAKAILSARLSKSRRLENLIAQLPGEKKNGLFGNLIALSLGLTPNFKSNFDLAEDAKLQLSKDTYDDDLDNLLAQIGDQYADLFLAAKNLSDAILLSDILRVNTEITKAPLSASMIKRYDEHHQDLTLLKALVRQQLPEKYKEIFFDQSKNGYAGYIDGGASQEEFYKFIKPILEKMDGTEELLVKLNREDLLRKQRTFDNGSIPHQIHLGELHAILRRQEDFYPFLKDNREKIEKILTFRIPYYVGPLARGNSRFAWMTRKSEETITPWNFEEVVDKGASAQSFIERMTNFDKNLPNEKVLPKHSLLYEYFTVYNELTKVKYVTEGMRKPAFLSGEQKKAIVDLLFKTNRKVTVKQLKEDYFKKIECFDSVEISGVEDRFNASLGTYHDLLKIIKDKDFLDNEENEDILEDIVLTLTLFEDREMIEERLKTYAHLFDDKVMKQLKRRRYTGWGRLSRKLINGIRDKQSGKTILDFLKSDGFANRNFMQLIHDDSLTFKEDIQKAQVSGQGDSLHEHIANLAGSPAIKKGILQTVKVVDELVKVMGRHKPENIVIEMARENQGSSGSETPGTSESATPESSGSEVEFSHEYWMRHALTLAKRARDEREVPVGAVLVLNNRVIGEGWNRAIGLHDPTAHAEIMALRQGGLVMQNYRLIDATLYVTFEPCVMCAGAMIHSRIGRVVFGVRNAKTGAAGSLMDVLHYPGMNHRVEITEGILADECAALLCYFFRMPRTTQKGQKNSRERMKRIEEGIKELGSQILKEHPVENTQLQNEKLYLYYLQNGRDMYVDQELDINRLSDYDVDHIVPQSFLKDDSIDNKVLTRSDKNRGKSDNVPSEEVVKKMKNYWRQLLNAKLITQRKFDNLTKAERGGLSELDKAGFIKRQLVETRQITKHVAQILDSRMNTKYDENDKLIREVKVITLKSKLVSDFRKDFQFYKVREINNYHHAHDAYLNAVVGTALIKKYPKLESEFVYGDYKVYDVRKMIAKSEQEIGKATAKYFFYSNIMNFFKTEITLANGEIRKRPLIETNGETGEIVWDKGRDFATVRKVLSMPQVNIVKKTEVQTGGFSKESILPKRNSDKLIARKKDWDPKKYGGFDSPTVAYSVLVVAKVEKGKSKKLKSVKELLGITIMERSSFEKNPIDFLEAKGYKEVKKDLIIKLPKYSLFELENGRKRMLASAGELQKGNELALPSKYVNFLYLASHYEKLKGSPEDNEQKQLFVEQHKHYLDEIIEQISEFSKRVILADANLDKVLSAYNKHRDKPIREQAENIIHLFTLTNLGAPAAFKYFDTTIDRKRYTSTKEVLDATLIHQSITGLYETRIDLSQLGGD

SEQ ID NO: 272 - protein, 1540 aa, synthetic construct
  REGION 1..1540: note = 110.1 Cas9 TadAins 1250 polypeptide sequence
MDKKYSIGLAIGTNSVGWAVITDEYKVPSKKFKVLGNTDRHSIKKNLIGALLFDSGETAEATRLKRTARRRYTRRKNRICYLQEIFSNEMAKVDDSFFHRLEESFLVEEDKKHERHPIFGNIVDEVAYHEKYPTIYHLRKKLVDSTDKADLRLIYLALAHMIKFRGHFLIEGDLNPDNSDVDKLFIQLVQTYNQLFEENPINASGVDAKAILSARLSKSRRLENLIAQLPGEKKNGLFGNLIALSLGLTPNFKSNFDLAEDAKLQLSKDTYDDDLDNLLAQIGDQYADLFLAAKNLSDAILLSDILRVNTEITKAPLSASMIKRYDEHHQDLTLLKALVRQQLPEKYKEIFFDQSKNGYAGYIDGGASQEEFYKFIKPILEKMDGTEELLVKLNREDLLRKQRTFDNGSIPHQIHLGELHAILRRQEDFYPFLKDNREKIEKILTFRIPYYVGPLARGNSRFAWMTRKSEETITPWNFEEVVDKGASAQSFIERMTNFDKNLPNEKVLPKHSLLYEYFTVYNELTKVKYVTEGMRKPAFLSGEQKKAIVDLLFKTNRKVTVKQLKEDYFKKIECFDSVEISGVEDRFNASLGTYHDLLKIIKDKDFLDNEENEDILEDIVLTLTLFEDREMIEERLKTYAHLFDDKVMKQLKRRRYTGWGRLSRKLINGIRDKQSGKTILDFLKSDGFANRNFMQLIHDDSLTFKEDIQKAQVSGQGDSLHEHIANLAGSPAIKKGILQTVKVVDELVKVMGRHKPENIVIEMARENQTTQKGQKNSRERMKRIEEGIKELGSQILKEHPVENTQLQNEKLYLYYLQNGRDMYVDQELDINRLSDYDVDHIVPQSFLKDDSIDNKVLTRSDKNRGKSDNVPSEEVVKKMKNYWRQLLNAKLITQRKFDNLTKAERGGLSELDKAGFIKRQLVETRQITKHVAQILDSRMNTKYDENDKLIREVKVITLKSKLVSDFRKDFQFYKVREINNYHHAHDAYLNAVVGTALIKKYPKLESEFVYGDYKVYDVRKMIAKSEQEIGKATAKYFFYSNIMNFFKTEITLANGEIRKRPLIETNGETGEIVWDKGRDFATVRKVLSMPQVNIVKKTEVQTGGFSKESILPKRNSDKLIARKKDWDPKKYGGFDSPTVAYSVLVVAKVEKGKSKKLKSVKELLGITIMERSSFEKNPIDFLEAKGYKEVKKDLIIKLPKYSLFELENGRKRMLASAGELQKGNELALPSKYVNFLYLASHYEKLKGSPGSSGSETPGTSESATPESSGSEVEFSHEYWMRHALTLAKRARDEREVPVGAVLVLNNRVIGEGWNRAIGLHDPTAHAEIMALRQGGLVMQNYRLIDATLYVTFEPCVMCAGAMIHSRIGRVVFGVRNAKTGAAGSLMDVLHYPGMNHRVEITEGILADECAALLCYFFRMPREDNEQKQLFVEQHKHYLDEIIEQISEFSKRVILADANLDKVLSAYNKHRDKPIREQAENIIHLFTLTNLGAPAAFKYFDTTIDRKRYTSTKEVLDATLIHQSITGLYETRIDLSQLGGD

SEQ ID NO: 273 - protein, 1543 aa, synthetic construct
  REGION 1..1543: note = 110.2 Cas9 TadAins 1250 polypeptide sequence
MDKKYSIGLAIGTNSVGWAVITDEYKVPSKKFKVLGNTDRHSIKKNLIGALLFDSGETAEATRLKRTARRRYTRRKNRICYLQEIFSNEMAKVDDSFFHRLEESFLVEEDKKHERHPIFGNIVDEVAYHEKYPTIYHLRKKLVDSTDKADLRLIYLALAHMIKFRGHFLIEGDLNPDNSDVDKLFIQLVQTYNQLFEENPINASGVDAKAILSARLSKSRRLENLIAQLPGEKKNGLFGNLIALSLGLTPNFKSNFDLAEDAKLQLSKDTYDDDLDNLLAQIGDQYADLFLAAKNLSDAILLSDILRVNTEITKAPLSASMIKRYDEHHQDLTLLKALVRQQLPEKYKEIFFDQSKNGYAGYIDGGASQEEFYKFIKPILEKMDGTEELLVKLNREDLLRKQRTFDNGSIPHQIHLGELHAILRRQEDFYPFLKDNREKIEKILTFRIPYYVGPLARGNSRFAWMTRKSEETITPWNFEEVVDKGASAQSFIERMTNFDKNLPNEKVLPKHSLLYEYFTVYNELTKVKYVTEGMRKPAFLSGEQKKAIVDLLFKTNRKVTVKQLKEDYFKKIECFDSVEISGVEDRFNASLGTYHDLLKIIKDKDFLDNEENEDILEDIVLTLTLFEDREMIEERLKTYAHLFDDKVMKQLKRRRYTGWGRLSRKLINGIRDKQSGKTILDFLKSDGFANRNFMQLIHDDSLTFKEDIQKAQVSGQGDSLHEHIANLAGSPAIKKGILQTVKVVDELVKVMGRHKPENIVIEMARENQTTQKGQKNSRERMKRIEEGIKELGSQILKEHPVENTQLQNEKLYLYYLQNGRDMYVDQELDINRLSDYDVDHIVPQSFLKDDSIDNKVLTRSDKNRGKSDNVPSEEVVKKMKNYWRQLLNAKLITQRKFDNLTKAERGGLSELDKAGFIKRQLVETRQITKHVAQILDSRMNTKYDENDKLIREVKVITLKSKLVSDFRKDFQFYKVREINNYHHAHDAYLNAVVGTALIKKYPKLESEFVYGDYKVYDVRKMIAKSEQEIGKATAKYFFYSNIMNFFKTEITLANGEIRKRPLIETNGETGEIVWDKGRDFATVRKVLSMPQVNIVKKTEVQTGGFSKESILPKRNSDKLIARKKDWDPKKYGGFDSPTVAYSVLVVAKVEKGKSKKLKSVKELLGITIMERSSFEKNPIDFLEAKGYKEVKKDLIIKLPKYSLFELENGRKRMLASAGELQKGNELALPSKYVNFLYLASHYEKLKGSPGSSGSSGSETPGTSESATPESSGSEVEFSHEYWMRHALTLAKRARDEREVPVGAVLVLNNRVIGEGWNRAIGLHDPTAHAEIMALRQGGLVMQNYRLIDATLYVTFEPCVMCAGAMIHSRIGRVVFGVRNAKTGAAGSLMDVLHYPGMNHRVEITEGILADECAALLCYFFRMPREDNEQKQLFVEQHKHYLDEIIEQISEFSKRVILADANLDKVLSAYNKHRDKPIREQAENIIHLFTLTNLGAPAAFKYFDTTIDRKRYTSTKEVLDATLIHQSITGLYETRIDLSQLGGD

SEQ ID NO: 274 - protein, 1546 aa, synthetic construct
  REGION 1..1546: note = 110.3 Cas9 TadAins 1250 polypeptide sequence
MDKKYSIGLAIGTNSVGWAVITDEYKVPSKKFKVLGNTDRHSIKKNLIGALLFDSGETAEATRLKRTARRRYTRRKNRICYLQEIFSNEMAKVDDSFFHRLEESFLVEEDKKHERHPIFGNIVDEVAYHEKYPTIYHLRKKLVDSTDKADLRLIYLALAHMIKFRGHFLIEGDLNPDNSDVDKLFIQLVQTYNQLFEENPINASGVDAKAILSARLSKSRRLENLIAQLPGEKKNGLFGNLIALSLGLTPNFKSNFDLAEDAKLQLSKDTYDDDLDNLLAQIGDQYADLFLAAKNLSDAILLSDILRVNTEITKAPLSASMIKRYDEHHQDLTLLKALVRQQLPEKYKEIFFDQSKNGYAGYIDGGASQEEFYKFIKPILEKMDGTEELLVKLNREDLLRKQRTFDNGSIPHQIHLGELHAILRRQEDFYPFLKDNREKIEKILTFRIPYYVGPLARGNSRFAWMTRKSEETITPWNFEEVVDKGASAQSFIERMTNFDKNLPNEKVLPKHSLLYEYFTVYNELTKVKYVTEGMRKPAFLSGEQKKAIVDLLFKTNRKVTVKQLKEDYFKKIECFDSVEISGVEDRFNASLGTYHDLLKIIKDKDFLDNEENEDILEDIVLTLTLFEDREMIEERLKTYAHLFDDKVMKQLKRRRYTGWGRLSRKLINGIRDKQSGKTILDFLKSDGFANRNFMQLIHDDSLTFKEDIQKAQVSGQGDSLHEHIANLAGSPAIKKGILQTVKVVDELVKVMGRHKPENIVIEMARENQTTQKGQKNSRERMKRIEEGIKELGSQILKEHPVENTQLQNEKLYLYYLQNGRDMYVDQELDINRLSDYDVDHIVPQSFLKDDSIDNKVLTRSDKNRGKSDNVPSEEVVKKMKNYWRQLLNAKLITQRKFDNLTKAERGGLSELDKAGFIKRQLVETRQITKHVAQILDSRMNTKYDENDKLIREVKVITLKSKLVSDFRKDFQFYKVREINNYHHAHDAYLNAVVGTALIKKYPKLESEFVYGDYKVYDVRKMIAKSEQEIGKATAKYFFYSNIMNFFKTEITLANGEIRKRPLIETNGETGEIVWDKGRDFATVRKVLSMPQVNIVKKTEVQTGGFSKESILPKRNSDKLIARKKDWDPKKYGGFDSPTVAYSVLVVAKVEKGKSKKLKSVKELLGITIMERSSFEKNPIDFLEAKGYKEVKKDLIIKLPKYSLFELENGRKRMLASAGELQKGNELALPSKYVNFLYLASHYEKLKGSPGSSGSSGSETPGTSESATPESGSSSGSEVEFSHEYWMRHALTLAKRARDEREVPVGAVLVLNNRVIGEGWNRAIGLHDPTAHAEIMALRQGGLVMQNYRLIDATLYVTFEPCVMCAGAMIHSRIGRVVFGVRNAKTGAAGSLMDVLHYPGMNHRVEITEGILADECAALLCYFFRMPREDNEQKQLFVEQHKHYLDEIIEQISEFSKRVILADANLDKVLSAYNKHRDKPIREQAENIIHLFTLTNLGAPAAFKYFDTTIDRKRYTSTKEVLDATLIHQSITGLYETRIDLSQLGGD

SEQ ID NO: 275 - protein, 1546 aa, synthetic construct
  REGION 1..1546: note = 110.4 Cas9 TadAins 1250 polypeptide sequence
MDKKYSIGLAIGTNSVGWAVITDEYKVPSKKFKVLGNTDRHSIKKNLIGALLFDSGETAEATRLKRTARRRYTRRKNRICYLQEIFSNEMAKVDDSFFHRLEESFLVEEDKKHERHPIFGNIVDEVAYHEKYPTIYHLRKKLVDSTDKADLRLIYLALAHMIKFRGHFLIEGDLNPDNSDVDKLFIQLVQTYNQLFEENPINASGVDAKAILSARLSKSRRLENLIAQLPGEKKNGLFGNLIALSLGLTPNFKSNFDLAEDAKLQLSKDTYDDDLDNLLAQIGDQYADLFLAAKNLSDAILLSDILRVNTEITKAPLSASMIKRYDEHHQDLTLLKALVRQQLPEKYKEIFFDQSKNGYAGYIDGGASQEEFYKFIKPILEKMDGTEELLVKLNREDLLRKQRTFDNGSIPHQIHLGELHAILRRQEDFYPFLKDNREKIEKILTFRIPYYVGPLARGNSRFAWMTRKSEETITPWNFEEVVDKGASAQSFIERMTNFDKNLPNEKVLPKHSLLYEYFTVYNELTKVKYVTEGMRKPAFLSGEQKKAIVDLLFKTNRKVTVKQLKEDYFKKIECFDSVEISGVEDRFNASLGTYHDLLKIIKDKDFLDNEENEDILEDIVLTLTLFEDREMIEERLKTYAHLFDDKVMKQLKRRRYTGWGRLSRKLINGIRDKQSGKTILDFLKSDGFANRNFMQLIHDDSLTFKEDIQKAQVSGQGDSLHEHIANLAGSPAIKKGILQTVKVVDELVKVMGRHKPENIVIEMARENQTTQKGQKNSRERMKRIEEGIKELGSQILKEHPVENTQLQNEKLYLYYLQNGRDMYVDQELDINRLSDYDVDHIVPQSFLKDDSIDNKVLTRSDKNRGKSDNVPSEEVVKKMKNYWRQLLNAKLITQRKFDNLTKAERGGLSELDKAGFIKRQLVETRQITKHVAQILDSRMNTKYDENDKLIREVKVITLKSKLVSDFRKDFQFYKVREINNYHHAHDAYLNAVVGTALIKKYPKLESEFVYGDYKVYDVRKMIAKSEQEIGKATAKYFFYSNIMNFFKTEITLANGEIRKRPLIETNGETGEIVWDKGRDFATVRKVLSMPQVNIVKKTEVQTGGFSKESILPKRNSDKLIARKKDWDPKKYGGFDSPTVAYSVLVVAKVEKGKSKKLKSVKELLGITIMERSSFEKNPIDFLEAKGYKEVKKDLIIKLPKYSLFELENGRKRMLASAGELQKGNELALPSKYVNFLYLASHYEKLKGSPGSSGSSGSETPGTSESATPESGSSSGSEVEFSHEYWMRHALTLAKRARDEREVPVGAVLVLNNRVIGEGWNRAIGLHDPTAHAEIMALRQGGLVMQNYRLIDATLYVTFEPCVMCAGAMIHSRIGRVVFGVRNAKTGAAGSLMDVLHYPGMNHRVEITEGILADECAALLCYFFRMRREDNEQKQLFVEQHKHYLDEIIEQISEFSKRVILADANLDKVLSAYNKHRDKPIREQAENIIHLFTLTNLGAPAAFKYFDTTIDRKRYTSTKEVLDATLIHQSITGLYETRIDLSQLGGD

SEQ ID NO: 276 - protein, 1546 aa, synthetic construct
  REGION 1..1546: note = 110.5 Cas9 TadAins 1249 polypeptide sequence
MDKKYSIGLAIGTNSVGWAVITDEYKVPSKKFKVLGNTDRHSIKKNLIGALLFDSGETAEATRLKRTARRRYTRRKNRICYLQEIFSNEMAKVDDSFFHRLEESFLVEEDKKHERHPIFGNIVDEVAYHEKYPTIYHLRKKLVDSTDKADLRLIYLALAHMIKFRGHFLIEGDLNPDNSDVDKLFIQLVQTYNQLFEENPINASGVDAKAILSARLSKSRRLENLIAQLPGEKKNGLFGNLIALSLGLTPNFKSNFDLAEDAKLQLSKDTYDDDLDNLLAQIGDQYADLFLAAKNLSDAILLSDILRVNTEITKAPLSASMIKRYDEHHQDLTLLKALVRQQLPEKYKEIFFDQSKNGYAGYIDGGASQEEFYKFIKPILEKMDGTEELLVKLNREDLLRKQRTFDNGSIPHQIHLGELHAILRRQEDFYPFLKDNREKIEKILTFRIPYYVGPLARGNSRFAWMTRKSEETITPWNFEEVVDKGASAQSFIERMTNFDKNLPNEKVLPKHSLLYEYFTVYNELTKVKYVTEGMRKPAFLSGEQKKAIVDLLFKTNRKVTVKQLKEDYFKKIECFDSVEISGVEDRFNASLGTYHDLLKIIKDKDFLDNEENEDILEDIVLTLTLFEDREMIEERLKTYAHLFDDKVMKQLKRRRYTGWGRLSRKLINGIRDKQSGKTILDFLKSDGFANRNFMQLIHDDSLTFKEDIQKAQVSGQGDSLHEHIANLAGSPAIKKGILQTVKVVDELVKVMGRHKPENIVIEMARENQTTQKGQKNSRERMKRIEEGIKELGSQILKEHPVENTQLQNEKLYLYYLQNGRDMYVDQELDINRLSDYDVDHIVPQSFLKDDSIDNKVLTRSDKNRGKSDNVPSEEVVKKMKNYWRQLLNAKLITQRKFDNLTKAERGGLSELDKAGFIKRQLVETRQITKHVAQILDSRMNTKYDENDKLIREVKVITLKSKLVSDFRKDFQFYKVREINNYHHAHDAYLNAVVGTALIKKYPKLESEFVYGDYKVYDVRKMIAKSEQEIGKATAKYFFYSNIMNFFKTEITLANGEIRKRPLIETNGETGEIVWDKGRDFATVRKVLSMPQVNIVKKTEVQTGGFSKESILPKRNSDKLIARKKDWDPKKYGGFDSPTVAYSVLVVAKVEKGKSKKLKSVKELLGITIMERSSFEKNPIDFLEAKGYKEVKKDLIIKLPKYSLFELENGRKRMLASAGELQKGNELALPSKYVNFLYLASHYEKLKGSGSSGSSGSETPGTSESATPESGSSSGSEVEFSHEYWMRHALTLAKRARDEREVPVGAVLVLNNRVIGEGWNRAIGLHDPTAHAEIMALRQGGLVMQNYRLIDATLYVTFEPCVMCAGAMIHSRIGRVVFGVRNAKTGAAGSLMDVLHYPGMNHRVEITEGILADECAALLCYFFRMRRPEDNEQKQLFVEQHKHYLDEIIEQISEFSKRVILADANLDKVLSAYNKHRDKPIREQAENIIHLFTLTNLGAPAAFKYFDTTIDRKRYTSTKEVLDATLIHQSITGLYETRIDLSQLGGD

SEQ ID NO: 277 - protein, 1551 aa, synthetic construct
  REGION 1..1551: note = 110.5 Cas9 TadAins delta59-66 1250 polypeptide sequence
MDKKYSIGLAIGTNSVGWAVITDEYKVPSKKFKVLGNTDRHSIKKNLIGALLFDSGETAEATRLKRTARRRYTRRKNRICYLQEIFSNEMAKVDDSFFHRLEESFLVEEDKKHERHPIFGNIVDEVAYHEKYPTIYHLRKKLVDSTDKADLRLIYLALAHMIKFRGHFLIEGDLNPDNSDVDKLFIQLVQTYNQLFEENPINASGVDAKAILSARLSKSRRLENLIAQLPGEKKNGLFGNLIALSLGLTPNFKSNFDLAEDAKLQLSKDTYDDDLDNLLAQIGDQYADLFLAAKNLSDAILLSDILRVNTEITKAPLSASMIKRYDEHHQDLTLLKALVRQQLPEKYKEIFFDQSKNGYAGYIDGGASQEEFYKFIKPILEKMDGTEELLVKLNREDLLRKQRTFDNGSIPHQIHLGELHAILRRQEDFYPFLKDNREKIEKILTFRIPYYVGPLARGNSRFAWMTRKSEETITPWNFEEVVDKGASAQSFIERMTNFDKNLPNEKVLPKHSLLYEYFTVYNELTKVKYVTEGMRKPAFLSGEQKKAIVDLLFKTNRKVTVKQLKEDYFKKIECFDSVEISGVEDRFNASLGTYHDLLKIIKDKDFLDNEENEDILEDIVLTLTLFEDREMIEERLKTYAHLFDDKVMKQLKRRRYTGWGRLSRKLINGIRDKQSGKTILDFLKSDGFANRNFMQLIHDDSLTFKEDIQKAQVSGQGDSLHEHIANLAGSPAIKKGILQTVKVVDELVKVMGRHKPENIVIEMARENQTTQKGQKNSRERMKRIEEGIKELGSQILKEHPVENTQLQNEKLYLYYLQNGRDMYVDQELDINRLSDYDVDHIVPQSFLKDDSIDNKVLTRSDKNRGKSDNVPSEEVVKKMKNYWRQLLNAKLITQRKFDNLTKAERGGLSELDKAGFIKRQLVETRQITKHVAQILDSRMNTKYDENDKLIREVKVITLKSKLVSDFRKDFQFYKVREINNYHHAHDAYLNAVVGTALIKKYPKLESEFVYGDYKVYDVRKMIAKSEQEIGKATAKYFFYSNIMNFFKTEITLANGEIRKRPLIETNGETGEIVWDKGRDFATVRKVLSMPQVNIVKKTEVQTGGFSKESILPKRNSDKLIARKKDWDPKKYGGFDSPTVAYSVLVVAKVEKGKSKKLKSVKELLGITIMERSSFEKNPIDFLEAKGYKEVKKDLIIKLPKYSLFELENGRKRMLASAGELQKGNELALPSKYVNFLYLASHYEKLKGSPGSSGSSGSETPGTSESATPESGSSGSEVEFSHEYWMRHALTLAKRARDEREVPVGAVLVLNNRVIGEGWNRAHAEIMALRQGGLVMQNYRLIDATLYVTFEPCVMCAGAMIHSRIGRVVFGVRNAKTGAAGSLMDVLHYPGMNHRVEITEGILADECAALLCYFFRMPRQVFNAQKKAQSSTDEDNEQKQLFVEQHKHYLDEIIEQISEFSKRVILADANLDKVLSAYNKHRDKPIREQAENIIHLFTLTNLGAPAAFKYFDTTIDRKRYTSTKEVLDATLIHQSITGLYETRIDLSQLGGD

SEQ ID NO: 278 - protein, 1546 aa, synthetic construct
  REGION 1..1546: note = 110.6 Cas9 TadAins 1251 polypeptide sequence
MDKKYSIGLAIGTNSVGWAVITDEYKVPSKKFKVLGNTDRHSIKKNLIGALLFDSGETAEATRLKRTARRRYTRRKNRICYLQEIFSNEMAKVDDSFFHRLEESFLVEEDKKHERHPIFGNIVDEVAYHEKYPTIYHLRKKLVDSTDKADLRLIYLALAHMIKFRGHFLIEGDLNPDNSDVDKLFIQLVQTYNQLFEENPINASGVDAKAILSARLSKSRRLENLIAQLPGEKKNGLFGNLIALSLGLTPNFKSNFDLAEDAKLQLSKDTYDDDLDNLLAQIGDQYADLFLAAKNLSDAILLSDILRVNTEITKAPLSASMIKRYDEHHQDLTLLKALVRQQLPEKYKEIFFDQSKNGYAGYIDGGASQEEFYKFIKPILEKMDGTEELLVKLNREDLLRKQRTFDNGSIPHQIHLGELHAILRRQEDFYPFLKDNREKIEKILTFRIPYYVGPLARGNSRFAWMTRKSEETITPWNFEEVVDKGASAQSFIERMTNFDKNLPNEKVLPKHSLLYEYFTVYNELTKVKYVTEGMRKPAFLSGEQKKAIVDLLFKTNRKVTVKQLKEDYFKKIECFDSVEISGVEDRFNASLGTYHDLLKIIKDKDFLDNEENEDILEDIVLTLTLFEDREMIEERLKTYAHLFDDKVMKQLKRRRYTGWGRLSRKLINGIRDKQSGKTILDFLKSDGFANRNFMQLIHDDSLTFKEDIQKAQVSGQGDSLHEHIANLAGSPAIKKGILQTVKVVDELVKVMGRHKPENIVIEMARENQTTQKGQKNSRERMKRIEEGIKELGSQILKEHPVENTQLQNEKLYLYYLQNGRDMYVDQELDINRLSDYDVDHIVPQSFLKDDSIDNKVLTRSDKNRGKSDNVPSEEVVKKMKNYWRQLLNAKLITQRKFDNLTKAERGGLSELDKAGFIKRQLVETRQITKHVAQILDSRMNTKYDENDKLIREVKVITLKSKLVSDFRKDFQFYKVREINNYHHAHDAYLNAVVGTALIKKYPKLESEFVYGDYKVYDVRKMIAKSEQEIGKATAKYFFYSNIMNFFKTEITLANGEIRKRPLIETNGETGEIVWDKGRDFATVRKVLSMPQVNIVKKTEVQTGGFSKESILPKRNSDKLIARKKDWDPKKYGGFDSPTVAYSVLVVAKVEKGKSKKLKSVKELLGITIMERSSFEKNPIDFLEAKGYKEVKKDLIIKLPKYSLFELENGRKRMLASAGELQKGNELALPSKYVNFLYLASHYEKLKGSPEGSSGSSGSETPGTSESATPESGSSSGSEVEFSHEYWMRHALTLAKRARDEREVPVGAVLVLNNRVIGEGWNRAIGLHDPTAHAEIMALRQGGLVMQNYRLIDATLYVTFEPCVMCAGAMIHSRIGRVVFGVRNAKTGAAGSLMDVLHYPGMNHRVEITEGILADECAALLCYFFRMRRDNEQKQLFVEQHKHYLDEIIEQISEFSKRVILADANLDKVLSAYNKHRDKPIREQAENIIHLFTLTNLGAPAAFKYFDTTIDRKRYTSTKEVLDATLIHQSITGLYETRIDLSQLGGD

SEQ ID NO: 279 - protein, 1546 aa, synthetic construct
  REGION 1..1546: note = 110.7 Cas9 TadAins 1252 polypeptide sequence
MDKKYSIGLAIGTNSVGWAVITDEYKVPSKKFKVLGNTDRHSIKKNLIGALLFDSGETAEATRLKRTARRRYTRRKNRICYLQEIFSNEMAKVDDSFFHRLEESFLVEEDKKHERHPIFGNIVDEVAYHEKYPTIYHLRKKLVDSTDKADLRLIYLALAHMIKFRGHFLIEGDLNPDNSDVDKLFIQLVQTYNQLFEENPINASGVDAKAILSARLSKSRRLENLIAQLPGEKKNGLFGNLIALSLGLTPNFKSNFDLAEDAKLQLSKDTYDDDLDNLLAQIGDQYADLFLAAKNLSDAILLSDILRVNTEITKAPLSASMIKRYDEHHQDLTLLKALVRQQLPEKYKEIFFDQSKNGYAGYIDGGASQEEFYKFIKPILEKMDGTEELLVKLNREDLLRKQRTFDNGSIPHQIHLGELHAILRRQEDFYPFLKDNREKIEKILTFRIPYYVGPLARGNSRFAWMTRKSEETITPWNFEEVVDKGASAQSFIERMTNFDKNLPNEKVLPKHSLLYEYFTVYNELTKVKYVTEGMRKPAFLSGEQKKAIVDLLFKTNRKVTVKQLKEDYFKKIECFDSVEISGVEDRFNASLGTYHDLLKIIKDKDFLDNEENEDILEDIVLTLTLFEDREMIEERLKTYAHLFDDKVMKQLKRRRYTGWGRLSRKLINGIRDKQSGKTILDFLKSDGFANRNFMQLIHDDSLTFKEDIQKAQVSGQGDSLHEHIANLAGSPAIKKGILQTVKVVDELVKVMGRHKPENIVIEMARENQTTQKGQKNSRERMKRIEEGIKELGSQILKEHPVENTQLQNEKLYLYYLQNGRDMYVDQELDINRLSDYDVDHIVPQSFLKDDSIDNKVLTRSDKNRGKSDNVPSEEVVKKMKNYWRQLLNAKLITQRKFDNLTKAERGGLSELDKAGFIKRQLVETRQITKHVAQILDSRMNTKYDENDKLIREVKVITLKSKLVSDFRKDFQFYKVREINNYHHAHDAYLNAVVGTALIKKYPKLESEFVYGDYKVYDVRKMIAKSEQEIGKATAKYFFYSNIMNFFKTEITLANGEIRKRPLIETNGETGEIVWDKGRDFATVRKVLSMPQVNIVKKTEVQTGGFSKESILPKRNSDKLIARKKDWDPKKYGGFDSPTVAYSVLVVAKVEKGKSKKLKSVKELLGITIMERSSFEKNPIDFLEAKGYKEVKKDLIIKLPKYSLFELENGRKRMLASAGELQKGNELALPSKYVNFLYLASHYEKLKGSPEDGSSGSSGSETPGTSESATPESGSSSGSEVEFSHEYWMRHALTLAKRARDEREVPVGAVLVLNNRVIGEGWNRAIGLHDPTAHAEIMALRQGGLVMQNYRLIDATLYVTFEPCVMCAGAMIHSRIGRVVFGVRNAKTGAAGSLMDVLHYPGMNHRVEITEGILADECAALLCYFFRMRRNEQKQLFVEQHKHYLDEIIEQISEFSKRVILADANLDKVLSAYNKHRDKPIREQAENIIHLFTLTNLGAPAAFKYFDTTIDRKRYTSTKEVLDATLIHQSITGLYETRIDLSQLGGD

SEQ ID NO: 280 - protein, 1533 aa, synthetic construct
  REGION 1..1533: note = 110.8 Cas9 TadAins delta59-66 C-truncate 1250 polypeptide sequence
MDKKYSIGLAIGTNSVGWAVITDEYKVPSKKFKVLGNTDRHSIKKNLIGALLFDSGETAEATRLKRTARRRYTRRKNRICYLQEIFSNEMAKVDDSFFHRLEESFLVEEDKKHERHPIFGNIVDEVAYHEKYPTIYHLRKKLVDSTDKADLRLIYLALAHMIKFRGHFLIEGDLNPDNSDVDKLFIQLVQTYNQLFEENPINASGVDAKAILSARLSKSRRLENLIAQLPGEKKNGLFGNLIALSLGLTPNFKSNFDLAEDAKLQLSKDTYDDDLDNLLAQIGDQYADLFLAAKNLSDAILLSDILRVNTEITKAPLSASMIKRYDEHHQDLTLLKALVRQQLPEKYKEIFFDQSKNGYAGYIDGGASQEEFYKFIKPILEKMDGTEELLVKLNREDLLRKQRTFDNGSIPHQIHLGELHAILRRQEDFYPFLKDNREKIEKILTFRIPYYVGPLARGNSRFAWMTRKSEETITPWNFEEVVDKGASAQSFIERMTNFDKNLPNEKVLPKHSLLYEYFTVYNELTKVKYVTEGMRKPAFLSGEQKKAIVDLLFKTNRKVTVKQLKEDYFKKIECFDSVEISGVEDRFNASLGTYHDLLKIIKDKDFLDNEENEDILEDIVLTLTLFEDREMIEERLKTYAHLFDDKVMKQLKRRRYTGWGRLSRKLINGIRDKQSGKTILDFLKSDGFANRNFMQLIHDDSLTFKEDIQKAQVSGQGDSLHEHIANLAGSPAIKKGILQTVKVVDELVKVMGRHKPENIVIEMARENQTTQKGQKNSRERMKRIEEGIKELGSQILKEHPVENTQLQNEKLYLYYLQNGRDMYVDQELDINRLSDYDVDHIVPQSFLKDDSIDNKVLTRSDKNRGKSDNVPSEEVVKKMKNYWRQLLNAKLITQRKFDNLTKAERGGLSELDKAGFIKRQLVETRQITKHVAQILDSRMNTKYDENDKLIREVKVITLKSKLVSDFRKDFQFYKVREINNYHHAHDAYLNAVVGTALIKKYPKLESEFVYGDYKVYDVRKMIAKSEQEIGKATAKYFFYSNIMNFFKTEITLANGEIRKRPLIETNGETGEIVWDKGRDFATVRKVLSMPQVNIVKKTEVQTGGFSKESILPKRNSDKLIARKKDWDPKKYGGFDSPTVAYSVLVVAKVEKGKSKKLKSVKELLGITIMERSSFEKNPIDFLEAKGYKEVKKDLIIKLPKYSLFELENGRKRMLASAGELQKGNELALPSKYVNFLYLASHYEKLKGSPGSSGSETPGTSESATPESSGSEVEFSHEYWMRHALTLAKRARDEREVPVGAVLVLNNRVIGEGWNRAHAEIMALRQGGLVMQNYRLIDATLYVTFEPCVMCAGAMIHSRIGRVVFGVRNAKTGAAGSLMDVLHYPGMNHRVEITEGILADECAALLCYFFRMPRQEDNEQKQLFVEQHKHYLDEIIEQISEFSKRVILADANLDKVLSAYNKHRDKPIREQAENIIHLFTLTNLGAPAAFKYFDTTIDRKRYTSTKEVLDATLIHQSITGLYETRIDLSQLGGD

SEQ ID NO: 281 - protein, 1549 aa, synthetic construct
  REGION 1..1549: note = 111.1 Cas9 TadAins 997 polypeptide sequence
MDKKYSIGLAIGTNSVGWAVITDEYKVPSKKFKVLGNTDRHSIKKNLIGALLFDSGETAEATRLKRTARRRYTRRKNRICYLQEIFSNEMAKVDDSFFHRLEESFLVEEDKKHERHPIFGNIVDEVAYHEKYPTIYHLRKKLVDSTDKADLRLIYLALAHMIKFRGHFLIEGDLNPDNSDVDKLFIQLVQTYNQLFEENPINASGVDAKAILSARLSKSRRLENLIAQLPGEKKNGLFGNLIALSLGLTPNFKSNFDLAEDAKLQLSKDTYDDDLDNLLAQIGDQYADLFLAAKNLSDAILLSDILRVNTEITKAPLSASMIKRYDEHHQDLTLLKALVRQQLPEKYKEIFFDQSKNGYAGYIDGGASQEEFYKFIKPILEKMDGTEELLVKLNREDLLRKQRTFDNGSIPHQIHLGELHAILRRQEDFYPFLKDNREKIEKILTFRIPYYVGPLARGNSRFAWMTRKSEETITPWNFEEVVDKGASAQSFIERMTNFDKNLPNEKVLPKHSLLYEYFTVYNELTKVKYVTEGMRKPAFLSGEQKKAIVDLLFKTNRKVTVKQLKEDYFKKIECFDSVEISGVEDRFNASLGTYHDLLKIIKDKDFLDNEENEDILEDIVLTLTLFEDREMIEERLKTYAHLFDDKVMKQLKRRRYTGWGRLSRKLINGIRDKQSGKTILDFLKSDGFANRNFMQLIHDDSLTFKEDIQKAQVSGQGDSLHEHIANLAGSPAIKKGILQTVKVVDELVKVMGRHKPENIVIEMARENQTTQKGQKNSRERMKRIEEGIKELGSQILKEHPVENTQLQNEKLYLYYLQNGRDMYVDQELDINRLSDYDVDHIVPQSFLKDDSIDNKVLTRSDKNRGKSDNVPSEEVVKKMKNYWRQLLNAKLITQRKFDNLTKAERGGLSELDKAGFIKRQLVETRQITKHVAQILDSRMNTKYDENDKLIREVKVITLKSKLVSDFRKDFQFYKVREINNYHHAHDAYLNAVVGTALSHEYWMRHALTLAKRARDEREVPVGAVLVLNNRVIGEGWNRAIGLHDPTAHAEIMALRQGGLVMQNYRLIDATLYVTFEPCVMCAGAMIHSRIGRVVFGVRNAKTGAAGSLMDVLHYPGMNHRVEITEGILADECAALLCYFFRMPRQVFNAQKKAQSSTDGSSGSETPGTSESATPESSGIKKYPKLESEFVYGDYKVYDVRKMIAKSEQEIGKATAKYFFYSNIMNFFKTEITLANGEIRKRPLIETNGETGEIVWDKGRDFATVRKVLSMPQVNIVKKTEVQTGGFSKESILPKRNSDKLIARKKDWDPKKYGGFDSPTVAYSVLVVAKVEKGKSKKLKSVKELLGITIMERSSFEKNPIDFLEAKGYKEVKKDLIIKLPKYSLFELENGRKRMLASAGELQKGNELALPSKYVNFLYLASHYEKLKGSPEDNEQKQLFVEQHKHYLDEIIEQISEFSKRVILADANLDKVLSAYNKHRDKPIREQAENIIHLFTLTNLGAPAAFKYFDTTIDRKRYTSTKEVLDATLIHQSITGLYETRIDLSQLGGD

SEQ ID NO: 282 - protein, 1555 aa, synthetic construct
  REGION 1..1555: note = 111.2 Cas9 TadAins 997 polypeptide sequence
MDKKYSIGLAIGTNSVGWAVITDEYKVPSKKFKVLGNTDRHSIKKNLIGALLFDSGETAEATRLKRTARRRYTRRKNRICYLQEIFSNEMAKVDDSFFHRLEESFLVEEDKKHERHPIFGNIVDEVAYHEKYPTIYHLRKKLVDSTDKADLRLIYLALAHMIKFRGHFLIEGDLNPDNSDVDKLFIQLVQTYNQLFEENPINASGVDAKAILSARLSKSRRLENLIAQLPGEKKNGLFGNLIALSLGLTPNFKSNFDLAEDAKLQLSKDTYDDDLDNLLAQIGDQYADLFLAAKNLSDAILLSDILRVNTEITKAPLSASMIKRYDEHHQDLTLLKALVRQQLPEKYKEIFFDQSKNGYAGYIDGGASQEEFYKFIKPILEKMDGTEELLVKLNREDLLRKQRTFDNGSIPHQIHLGELHAILRRQEDFYPFLKDNREKIEKILTFRIPYYVGPLARGNSRFAWMTRKSEETITPWNFEEVVDKGASAQSFIERMTNFDKNLPNEKVLPKHSLLYEYFTVYNELTKVKYVTEGMRKPAFLSGEQKKAIVDLLFKTNRKVTVKQLKEDYFKKIECFDSVEISGVEDRFNASLGTYHDLLKIIKDKDFLDNEENEDILEDIVLTLTLFEDREMIEERLKTYAHLFDDKVMKQLKRRRYTGWGRLSRKLINGIRDKQSGKTILDFLKSDGFANRNFMQLIHDDSLTFKEDIQKAQVSGQGDSLHEHIANLAGSPAIKKGILQTVKVVDELVKVMGRHKPENIVIEMARENQTTQKGQKNSRERMKRIEEGIKELGSQILKEHPVENTQLQNEKLYLYYLQNGRDMYVDQELDINRLSDYDVDHIVPQSFLKDDSIDNKVLTRSDKNRGKSDNVPSEEVVKKMKNYWRQLLNAKLITQRKFDNLTKAERGGLSELDKAGFIKRQLVETRQITKHVAQILDSRMNTKYDENDKLIREVKVITLKSKLVSDFRKDFQFYKVREINNYHHAHDAYLNAVVGTALSHEYWMRHALTLAKRARDEREVPVGAVLVLNNRVIGEGWNRAIGLHDPTAHAEIMALRQGGLVMQNYRLIDATLYVTFEPCVMCAGAMIHSRIGRVVFGVRNAKTGAAGSLMDVLHYPGMNHRVEITEGILADECAALLCYFFRMPRQVFNAQKKAQSSTDGSSGSSGSETPGTSESATPESSGGSSIKKYPKLESEFVYGDYKVYDVRKMIAKSEQEIGKATAKYFFYSNIMNFFKTEITLANGEIRKRPLIETNGETGEIVWDKGRDFATVRKVLSMPQVNIVKKTEVQTGGFSKESILPKRNSDKLIARKKDWDPKKYGGFDSPTVAYSVLVVAKVEKGKSKKLKSVKELLGITIMERSSFEKNPIDFLEAKGYKEVKKDLIIKLPKYSLFELENGRKRMLASAGELQKGNELALPSKYVNFLYLASHYEKLKGSPEDNEQKQLFVEQHKHYLDEIIEQISEFSKRVILADANLDKVLSAYNKHRDKPIREQAENIIHLFTLTNLGAPAAFKYFDTTIDRKRYTSTKEVLDATLIHQSITGLYETRIDLSQLGGD

SEQ ID NO: 283 - protein, 1421 aa, synthetic construct
  REGION 1..1421: note = 112 delta HNH TadA polypeptide sequence
MDKKYSIGLAIGTNSVGWAVITDEYKVPSKKFKVLGNTDRHSIKKNLIGALLFDSGETAEATRLKRTARRRYTRRKNRICYLQEIFSNEMAKVDDSFFHRLEESFLVEEDKKHERHPIFGNIVDEVAYHEKYPTIYHLRKKLVDSTDKADLRLIYLALAHMIKFRGHFLIEGDLNPDNSDVDKLFIQLVQTYNQLFEENPINASGVDAKAILSARLSKSRRLENLIAQLPGEKKNGLFGNLIALSLGLTPNFKSNFDLAEDAKLQLSKDTYDDDLDNLLAQIGDQYADLFLAAKNLSDAILLSDILRVNTEITKAPLSASMIKRYDEHHQDLTLLKALVRQQLPEKYKEIFFDQSKNGYAGYIDGGASQEEFYKFIKPILEKMDGTEELLVKLNREDLLRKQRTFDNGSIPHQIHLGELHAILRRQEDFYPFLKDNREKIEKILTFRIPYYVGPLARGNSRFAWMTRKSEETITPWNFEEVVDKGASAQSFIERMTNFDKNLPNEKVLPKHSLLYEYFTVYNELTKVKYVTEGMRKPAFLSGEQKKAIVDLLFKTNRKVTVKQLKEDYFKKIECFDSVEISGVEDRFNASLGTYHDLLKIIKDKDFLDNEENEDILEDIVLTLTLFEDREMIEERLKTYAHLFDDKVMKQLKRRRYTGWGRLSRKLINGIRDKQSGKTILDFLKSDGFANRNFMQLIHDDSLTFKEDIQKAQVSGQGDSLHEHIANLAGSPAIKKGILQTVKVVDELVKVMGRHKPENIVIEMARENQTTQKGQKNSRERMKRIEEGIKELGSEVEFSHEYWMRHALTLAKRARDEREVPVGAVLVLNNRVIGEGWNRAIGLHDPTAHAEIMALRQGGLVMQNYRLIDATLYVTFEPCVMCAGAMIHSRIGRVVFGVRNAKTGAAGSLMDVLHYPGMNHRVEITEGILADECAALLCYFFRMPRQVFNAQKKAQSSTDGGLSELDKAGFIKRQLVETRQITKHVAQILDSRMNTKYDENDKLIREVKVITLKSKLVSDFRKDFQFYKVREINNYHHAHDAYLNAVVGTALIKKYPKLESEFVYGDYKVYDVRKMIAKSEQEIGKATAKYFFYSNIMNFFKTEITLANGEIRKRPLIETNGETGEIVWDKGRDFATVRKVLSMPQVNIVKKTEVQTGGFSKESILPKRNSDKLIARKKDWDPKKYGGFDSPTVAYSVLVVAKVEKGKSKKLKSVKELLGITIMERSSFEKNPIDFLEAKGYKEVKKDLIIKLPKYSLFELENGRKRMLASAGELQKGNELALPSKYVNFLYLASHYEKLKGSPEDNEQKQLFVEQHKHYLDEIIEQISEFSKRVILADANLDKVLSAYNKHRDKPIREQAENIIHLFTLTNLGAPAAFKYFDTTIDRKRYTSTKEVLDATLIHQSITGLYETRIDLSQLGGD

SEQ ID NO: 284 - protein, 1552 aa, synthetic construct
  REGION 1..1552: note = 113 N-term single TadA helixtrunc 165-end polypeptide sequence
MSEVEFSHEYWMRHALTLAKRARDEREVPVGAVLVLNNRVIGEGWNRAIGLHDPTAHAEIMALRQGGLVMQNYRLIDATLYVTFEPCVMCAGAMIHSRIGRVVFGVRNAKTGAAGSLMDVLHYPGMNHRVEITEGILADECAALLCYFFRMPRSGGSSGGSSGSETPGTSESATPESSGGSSGGSDKKYSIGLAIGTNSVGWAVITDEYKVPSKKFKVLGNTDRHSIKKNLIGALLFDSGETAEATRLKRTARRRYTRRKNRICYLQEIFSNEMAKVDDSFFHRLEESFLVEEDKKHERHPIFGNIVDEVAYHEKYPTIYHLRKKLVDSTDKADLRLIYLALAHMIKFRGHFLIEGDLNPDNSDVDKLFIQLVQTYNQLFEENPINASGVDAKAILSARLSKSRRLENLIAQLPGEKKNGLFGNLIALSLGLTPNFKSNFDLAEDAKLQLSKDTYDDDLDNLLAQIGDQYADLFLAAKNLSDAILLSDILRVNTEITKAPLSASMIKRYDEHHQDLTLLKALVRQQLPEKYKEIFFDQSKNGYAGYIDGGASQEEFYKFIKPILEKMDGTEELLVKLNREDLLRKQRTFDNGSIPHQIHLGELHAILRRQEDFYPFLKDNREKIEKILTFRIPYYVGPLARGNSRFAWMTRKSEETITPWNFEEVVDKGASAQSFIERMTNFDKNLPNEKVLPKHSLLYEYFTVYNELTKVKYVTEGMRKPAFLSGEQKKAIVDLLFKTNRKVTVKQLKEDYFKKIECFDSVEISGVEDRFNASLGTYHDLLKIIKDKDFLDNEENEDILEDIVLTLTLFEDREMIEERLKTYAHLFDDKVMKQLKRRRYTGWGRLSRKLINGIRDKQSGKTILDFLKSDGFANRNFMQLIHDDSLTFKEDIQKAQVSGQGDSLHEHIANLAGSPAIKKGILQTVKVVDELVKVMGRHKPENIVIEMARENQTTQKGQKNSRERMKRIEEGIKELGSQILKEHPVENTQLQNEKLYLYYLQNGRDMYVDQELDINRLSDYDVDHIVPQSFLKDDSIDNKVLTRSDKNRGKSDNVPSEEVVKKMKNYWRQLLNAKLITQRKFDNLTKAERGGLSELDKAGFIKRQLVETRQITKHVAQILDSRMNTKYDENDKLIREVKVITLKSKLVSDFRKDFQFYKVREINNYHHAHDAYLNAVVGTALIKKYPKLESEFVYGDYKVYDVRKMIAKSEQEIGKATAKYFFYSNIMNFFKTEITLANGEIRKRPLIETNGETGEIVWDKGRDFATVRKVLSMPQVNIVKKTEVQTGGFSKESILPKRNSDKLIARKKDWDPKKYGGFDSPTVAYSVLVVAKVEKGKSKKLKSVKELLGITIMERSSFEKNPIDFLEAKGYKEVKKDLIIKLPKYSLFELENGRKRMLASAGELQKGNELALPSKYVNFLYLASHYEKLKGSPEDNEQKQLFVEQHKHYLDEIIEQISEFSKRVILADANLDKVLSAYNKHRDKPIREQAENIIHLFTLTNLGAPAAFKYFDTTIDRKRYTSTKEVLDATLIHQSITGLYETRIDLSQLGGD

SEQ ID NO: 285 - protein, 1545 aa, synthetic construct
  REGION 1..1545: note = 114 N-term single TadA helixtrunc 165-end delta 59-65 polypeptide sequence
MSEVEFSHEYWMRHALTLAKRARDEREVPVGAVLVLNNRVIGEGWNRTAHAEIMALRQGGLVMQNYRLIDATLYVTFEPCVMCAGAMIHSRIGRVVFGVRNAKTGAAGSLMDVLHYPGMNHRVEITEGILADECAALLCYFFRMPRSGGSSGGSSGSETPGTSESATPESSGGSSGGSDKKYSIGLAIGTNSVGWAVITDEYKVPSKKFKVLGNTDRHSIKKNLIGALLFDSGETAEATRLKRTARRRYTRRKNRICYLQEIFSNEMAKVDDSFFHRLEESFLVEEDKKHERHPIFGNIVDEVAYHEKYPTIYHLRKKLVDSTDKADLRLIYLALAHMIKFRGHFLIEGDLNPDNSDVDKLFIQLVQTYNQLFEENPINASGVDAKAILSARLSKSRRLENLIAQLPGEKKNGLFGNLIALSLGLTPNFKSNFDLAEDAKLQLSKDTYDDDLDNLLAQIGDQYADLFLAAKNLSDAILLSDILRVNTEITKAPLSASMIKRYDEHHQDLTLLKALVRQQLPEKYKEIFFDQSKNGYAGYIDGGASQEEFYKFIKPILEKMDGTEELLVKLNREDLLRKQRTFDNGSIPHQIHLGELHAILRRQEDFYPFLKDNREKIEKILTFRIPYYVGPLARGNSRFAWMTRKSEETITPWNFEEVVDKGASAQSFIERMTNFDKNLPNEKVLPKHSLLYEYFTVYNELTKVKYVTEGMRKPAFLSGEQKKAIVDLLFKTNRKVTVKQLKEDYFKKIECFDSVEISGVEDRFNASLGTYHDLLKIIKDKDFLDNEENEDILEDIVLTLTLFEDREMIEERLKTYAHLFDDKVMKQLKRRRYTGWGRLSRKLINGIRDKQSGKTILDFLKSDGFANRNFMQLIHDDSLTFKEDIQKAQVSGQGDSLHEHIANLAGSPAIKKGILQTVKVVDELVKVMGRHKPENIVIEMARENQTTQKGQKNSRERMKRIEEGIKELGSQILKEHPVENTQLQNEKLYLYYLQNGRDMYVDQELDINRLSDYDVDHIVPQSFLKDDSIDNKVLTRSDKNRGKSDNVPSEEVVKKMKNYWRQLLNAKLITQRKFDNLTKAERGGLSELDKAGFIKRQLVETRQITKHVAQILDSRMNTKYDENDKLIREVKVITLKSKLVSDFRKDFQFYKVREINNYHHAHDAYLNAVVGTALIKKYPKLESEFVYGDYKVYDVRKMIAKSEQEIGKATAKYFFYSNIMNFFKTEITLANGEIRKRPLIETNGETGEIVWDKGRDFATVRKVLSMPQVNIVKKTEVQTGGFSKESILPKRNSDKLIARKKDWDPKKYGGFDSPTVAYSVLVVAKVEKGKSKKLKSVKELLGITIMERSSFEKNPIDFLEAKGYKEVKKDLIIKLPKYSLFELENGRKRMLASAGELQKGNELALPSKYVNFLYLASHYEKLKGSPEDNEQKQLFVEQHKHYLDEIIEQISEFSKRVILADANLDKVLSAYNKHRDKPIREQAENIIHLFTLTNLGAPAAFKYFDTTIDRKRYTSTKEVLDATLIHQSITGLYETRIDLSQLGGD

SEQ ID NO: 286 - protein, 1541 aa, synthetic construct
  REGION 1..1541: note = 115.1 Cas9 TadAins 1004 polypeptide sequence
MDKKYSIGLAIGTNSVGWAVITDEYKVPSKKFKVLGNTDRHSIKKNLIGALLFDSGETAEATRLKRTARRRYTRRKNRICYLQEIFSNEMAKVDDSFFHRLEESFLVEEDKKHERHPIFGNIVDEVAYHEKYPTIYHLRKKLVDSTDKADLRLIYLALAHMIKFRGHFLIEGDLNPDNSDVDKLFIQLVQTYNQLFEENPINASGVDAKAILSARLSKSRRLENLIAQLPGEKKNGLFGNLIALSLGLTPNFKSNFDLAEDAKLQLSKDTYDDDLDNLLAQIGDQYADLFLAAKNLSDAILLSDILRVNTEITKAPLSASMIKRYDEHHQDLTLLKALVRQQLPEKYKEIFFDQSKNGYAGYIDGGASQEEFYKFIKPILEKMDGTEELLVKLNREDLLRKQRTFDNGSIPHQIHLGELHAILRRQEDFYPFLKDNREKIEKILTFRIPYYVGPLARGNSRFAWMTRKSEETITPWNFEEVVDKGASAQSFIERMTNFDKNLPNEKVLPKHSLLYEYFTVYNELTKVKYVTEGMRKPAFLSGEQKKAIVDLLFKTNRKVTVKQLKEDYFKKIECFDSVEISGVEDRFNASLGTYHDLLKIIKDKDFLDNEENEDILEDIVLTLTLFEDREMIEERLKTYAHLFDDKVMKQLKRRRYTGWGRLSRKLINGIRDKQSGKTILDFLKSDGFANRNFMQLIHDDSLTFKEDIQKAQVSGQGDSLHEHIANLAGSPAIKKGILQTVKVVDELVKVMGRHKPENIVIEMARENQTTQKGQKNSRERMKRIEEGIKELGSQILKEHPVENTQLQNEKLYLYYLQNGRDMYVDQELDINRLSDYDVDHIVPQSFLKDDSIDNKVLTRSDKNRGKSDNVPSEEVVKKMKNYWRQLLNAKLITQRKFDNLTKAERGGLSELDKAGFIKRQLVETRQITKHVAQILDSRMNTKYDENDKLIREVKVITLKSKLVSDFRKDFQFYKVREINNYHHAHDAYLNAVVGTALIKKYPKGSSGSETPGTSESATPESSGSEVEFSHEYWMRHALTLAKRARDEREVPVGAVLVLNNRVIGEGWNRAIGLHDPTAHAEIMALRQGGLVMQNYRLIDATLYVTFEPCVMCAGAMIHSRIGRVVFGVRNAKTGAAGSLMDVLHYPGMNHRVEITEGILADECAALLCYFFRMPRQLESEFVYGDYKVYDVRKMIAKSEQEIGKATAKYFFYSNIMNFFKTEITLANGEIRKRPLIETNGETGEIVWDKGRDFATVRKVLSMPQVNIVKKTEVQTGGFSKESILPKRNSDKLIARKKDWDPKKYGGFDSPTVAYSVLVVAKVEKGKSKKLKSVKELLGITIMERSSFEKNPIDFLEAKGYKEVKKDLIIKLPKYSLFELENGRKRMLASAGELQKGNELALPSKYVNFLYLASHYEKLKGSPEDNEQKQLFVEQHKHYLDEIIEQISEFSKRVILADANLDKVLSAYNKHRDKPIREQAENIIHLFTLTNLGAPAAFKYFDTTIDRKRYTSTKEVLDATLIHQSITGLYETRIDLSQLGGD

SEQ ID NO: 287 - protein, 1541 aa, synthetic construct
  REGION 1..1541: note = 115.2 Cas9 TadAins 1005 polypeptide sequence
MDKKYSIGLAIGTNSVGWAVITDEYKVPSKKFKVLGNTDRHSIKKNLIGALLFDSGETAEATRLKRTARRRYTRRKNRICYLQEIFSNEMAKVDDSFFHRLEESFLVEEDKKHERHPIFGNIVDEVAYHEKYPTIYHLRKKLVDSTDKADLRLIYLALAHMIKFRGHFLIEGDLNPDNSDVDKLFIQLVQTYNQLFEENPINASGVDAKAILSARLSKSRRLENLIAQLPGEKKNGLFGNLIALSLGLTPNFKSNFDLAEDAKLQLSKDTYDDDLDNLLAQIGDQYADLFLAAKNLSDAILLSDILRVNTEITKAPLSASMIKRYDEHHQDLTLLKALVRQQLPEKYKEIFFDQSKNGYAGYIDGGASQEEFYKFIKPILEKMDGTEELLVKLNREDLLRKQRTFDNGSIPHQIHLGELHAILRRQEDFYPFLKDNREKIEKILTFRIPYYVGPLARGNSRFAWMTRKSEETITPWNFEEVVDKGASAQSFIERMTNFDKNLPNEKVLPKHSLLYEYFTVYNELTKVKYVTEGMRKPAFLSGEQKKAIVDLLFKTNRKVTVKQLKEDYFKKIECFDSVEISGVEDRFNASLGTYHDLLKIIKDKDFLDNEENEDILEDIVLTLTLFEDREMIEERLKTYAHLFDDKVMKQLKRRRYTGWGRLSRKLINGIRDKQSGKTILDFLKSDGFANRNFMQLIHDDSLTFKEDIQKAQVSGQGDSLHEHIANLAGSPAIKKGILQTVKVVDELVKVMGRHKPENIVIEMARENQTTQKGQKNSRERMKRIEEGIKELGSQILKEHPVENTQLQNEKLYLYYLQNGRDMYVDQELDINRLSDYDVDHIVPQSFLKDDSIDNKVLTRSDKNRGKSDNVPSEEVVKKMKNYWRQLLNAKLITQRKFDNLTKAERGGLSELDKAGFIKRQLVETRQITKHVAQILDSRMNTKYDENDKLIREVKVITLKSKLVSDFRKDFQFYKVREINNYHHAHDAYLNAVVGTALIKKYPKLGSSGSETPGTSESATPESSGSEVEFSHEYWMRHALTLAKRARDEREVPVGAVLVLNNRVIGEGWNRAIGLHDPTAHAEIMALRQGGLVMQNYRLIDATLYVTFEPCVMCAGAMIHSRIGRVVFGVRNAKTGAAGSLMDVLHYPGMNHRVEITEGILADECAALLCYFFRMPRQESEFVYGDYKVYDVRKMIAKSEQEIGKATAKYFFYSNIMNFFKTEITLANGEIRKRPLIETNGETGEIVWDKGRDFATVRKVLSMPQVNIVKKTEVQTGGFSKESILPKRNSDKLIARKKDWDPKKYGGFDSPTVAYSVLVVAKVEKGKSKKLKSVKELLGITIMERSSFEKNPIDFLEAKGYKEVKKDLIIKLPKYSLFELENGRKRMLASAGELQKGNELALPSKYVNFLYLASHYEKLKGSPEDNEQKQLFVEQHKHYLDEIIEQISEFSKRVILADANLDKVLSAYNKHRDKPIREQAENIIHLFTLTNLGAPAAFKYFDTTIDRKRYTSTKEVLDATLIHQSITGLYETRIDLSQLGGD

SEQ ID NO: 288 - protein, 1541 aa, synthetic construct
  REGION 1..1541: note = 115.3 Cas9 TadAins 1006 polypeptide sequence
MDKKYSIGLAIGTNSVGWAVITDEYKVPSKKFKVLGNTDRHSIKKNLIGALLFDSGETAEATRLKRTARRRYTRRKNRICYLQEIFSNEMAKVDDSFFHRLEESFLVEEDKKHERHPIFGNIVDEVAYHEKYPTIYHLRKKLVDSTDKADLRLIYLALAHMIKFRGHFLIEGDLNPDNSDVDKLFIQLVQTYNQLFEENPINASGVDAKAILSARLSKSRRLENLIAQLPGEKKNGLFGNLIALSLGLTPNFKSNFDLAEDAKLQLSKDTYDDDLDNLLAQIGDQYADLFLAAKNLSDAILLSDILRVNTEITKAPLSASMIKRYDEHHQDLTLLKALVRQQLPEKYKEIFFDQSKNGYAGYIDGGASQEEFYKFIKPILEKMDGTEELLVKLNREDLLRKQRTFDNGSIPHQIHLGELHAILRRQEDFYPFLKDNREKIEKILTFRIPYYVGPLARGNSRFAWMTRKSEETITPWNFEEVVDKGASAQSFIERMTNFDKNLPNEKVLPKHSLLYEYFTVYNELTKVKYVTEGMRKPAFLSGEQKKAIVDLLFKTNRKVTVKQLKEDYFKKIECFDSVEISGVEDRFNASLGTYHDLLKIIKDKDFLDNEENEDILEDIVLTLTLFEDREMIEERLKTYAHLFDDKVMKQLKRRRYTGWGRLSRKLINGIRDKQSGKTILDFLKSDGFANRNFMQLIHDDSLTFKEDIQKAQVSGQGDSLHEHIANLAGSPAIKKGILQTVKVVDELVKVMGRHKPENIVIEMARENQTTQKGQKNSRERMKRIEEGIKELGSQILKEHPVENTQLQNEKLYLYYLQNGRDMYVDQELDINRLSDYDVDHIVPQSFLKDDSIDNKVLTRSDKNRGKSDNVPSEEVVKKMKNYWRQLLNAKLITQRKFDNLTKAERGGLSELDKAGFIKRQLVETRQITKHVAQILDSRMNTKYDENDKLIREVKVITLKSKLVSDFRKDFQFYKVREINNYHHAHDAYLNAVVGTALIKKYPKLEGSSGSETPGTSESATPESSGSEVEFSHEYWMRHALTLAKRARDEREVPVGAVLVLNNRVIGEGWNRAIGLHDPTAHAEIMALRQGGLVMQNYRLIDATLYVTFEPCVMCAGAMIHSRIGRVVFGVRNAKTGAAGSLMDVLHYPGMNHRVEITEGILADECAALLCYFFRMPRQSEFVYGDYKVYDVRKMIAKSEQEIGKATAKYFFYSNIMNFFKTEITLANGEIRKRPLIETNGETGEIVWDKGRDFATVRKVLSMPQVNIVKKTEVQTGGFSKESILPKRNSDKLIARKKDWDPKKYGGFDSPTVAYSVLVVAKVEKGKSKKLKSVKELLGITIMERSSFEKNPIDFLEAKGYKEVKKDLIIKLPKYSLFELENGRKRMLASAGELQKGNELALPSKYVNFLYLASHYEKLKGSPEDNEQKQLFVEQHKHYLDEIIEQISEFSKRVILADANLDKVLSAYNKHRDKPIREQAENIIHLFTLTNLGAPAAFKYFDTTIDRKRYTSTKEVLDATLIHQSITGLYETRIDLSQLGGD

SEQ ID NO: 289 - protein, 1541 aa, synthetic construct
  REGION 1..1541: note = 115.4 Cas9 TadAins 1007 polypeptide sequence
MDKKYSIGLAIGTNSVGWAVITDEYKVPSKKFKVLGNTDRHSIKKNLIGALLFDSGETAEATRLKRTARRRYTRRKNRICYLQEIFSNEMAKVDDSFFHRLEESFLVEEDKKHERHPIFGNIVDEVAYHEKYPTIYHLRKKLVDSTDKADLRLIYLALAHMIKFRGHFLIEGDLNPDNSDVDKLFIQLVQTYNQLFEENPINASGVDAKAILSARLSKSRRLENLIAQLPGEKKNGLFGNLIALSLGLTPNFKSNFDLAEDAKLQLSKDTYDDDLDNLLAQIGDQYADLFLAAKNLSDAILLSDILRVNTEITKAPLSASMIKRYDEHHQDLTLLKALVRQQLPEKYKEIFFDQSKNGYAGYIDGGASQEEFYKFIKPILEKMDGTEELLVKLNREDLLRKQRTFDNGSIPHQIHLGELHAILRRQEDFYPFLKDNREKIEKILTFRIPYYVGPLARGNSRFAWMTRKSEETITPWNFEEVVDKGASAQSFIERMTNFDKNLPNEKVLPKHSLLYEYFTVYNELTKVKYVTEGMRKPAFLSGEQKKAIVDLLFKTNRKVTVKQLKEDYFKKIECFDSVEISGVEDRFNASLGTYHDLLKIIKDKDFLDNEENEDILEDIVLTLTLFEDREMIEERLKTYAHLFDDKVMKQLKRRRYTGWGRLSRKLINGIRDKQSGKTILDFLKSDGFANRNFMQLIHDDSLTFKEDIQKAQVSGQGDSLHEHIANLAGSPAIKKGILQTVKVVDELVKVMGRHKPENIVIEMARENQTTQKGQKNSRERMKRIEEGIKELGSQILKEHPVENTQLQNEKLYLYYLQNGRDMYVDQELDINRLSDYDVDHIVPQSFLKDDSIDNKVLTRSDKNRGKSDNVPSEEVVKKMKNYWRQLLNAKLITQRKFDNLTKAERGGLSELDKAGFIKRQLVETRQITKHVAQILDSRMNTKYDENDKLIREVKVITLKSKLVSDFRKDFQFYKVREINNYHHAHDAYLNAVVGTALIKKYPKLESGSSGSETPGTSESATPESSGSEVEFSHEYWMRHALTLAKRARDEREVPVGAVLVLNNRVIGEGWNRAIGLHDPTAHAEIMALRQGGLVMQNYRLIDATLYVTFEPCVMCAGAMIHSRIGRVVFGVRNAKTGAAGSLMDVLHYPGMNHRVEITEGILADECAALLCYFFRMPRQEFVYGDYKVYDVRKMIAKSEQEIGKATAKYFFYSNIMNFFKTEITLANGEIRKRPLIETNGETGEIVWDKGRDFATVRKVLSMPQVNIVKKTEVQTGGFSKESILPKRNSDKLIARKKDWDPKKYGGFDSPTVAYSVLVVAKVEKGKSKKLKSVKELLGITIMERSSFEKNPIDFLEAKGYKEVKKDLIIKLPKYSLFELENGRKRMLASAGELQKGNELALPSKYVNFLYLASHYEKLKGSPEDNEQKQLFVEQHKHYLDEIIEQISEFSKRVILADANLDKVLSAYNKHRDKPIREQAENIIHLFTLTNLGAPAAFKYFDTTIDRKRYTSTKEVLDATLIHQSITGLYETRIDLSQLGGD

SEQ ID NO: 290 - protein, 1541 aa, synthetic construct
  REGION 1..1541: note = 116.1 Cas9 TadAins C-term truncate 792 polypeptide sequence
MDKKYSIGLAIGTNSVGWAVITDEYKVPSKKFKVLGNTDRHSIKKNLIGALLFDSGETAEATRLKRTARRRYTRRKNRICYLQEIFSNEMAKVDDSFFHRLEESFLVEEDKKHERHPIFGNIVDEVAYHEKYPTIYHLRKKLVDSTDKADLRLIYLALAHMIKFRGHFLIEGDLNPDNSDVDKLFIQLVQTYNQLFEENPINASGVDAKAILSARLSKSRRLENLIAQLPGEKKNGLFGNLIALSLGLTPNFKSNFDLAEDAKLQLSKDTYDDDLDNLLAQIGDQYADLFLAAKNLSDAILLSDILRVNTEITKAPLSASMIKRYDEHHQDLTLLKALVRQQLPEKYKEIFFDQSKNGYAGYIDGGASQEEFYKFIKPILEKMDGTEELLVKLNREDLLRKQRTFDNGSIPHQIHLGELHAILRRQEDFYPFLKDNREKIEKILTFRIPYYVGPLARGNSRFAWMTRKSEETITPWNFEEVVDKGASAQSFIERMTNFDKNLPNEKVLPKHSLLYEYFTVYNELTKVKYVTEGMRKPAFLSGEQKKAIVDLLFKTNRKVTVKQLKEDYFKKIECFDSVEISGVEDRFNASLGTYHDLLKIIKDKDFLDNEENEDILEDIVLTLTLFEDREMIEERLKTYAHLFDDKVMKQLKRRRYTGWGRLSRKLINGIRDKQSGKTILDFLKSDGFANRNFMQLIHDDSLTFKEDIQKAQVSGQGDSLHEHIANLAGSPAIKKGILQTVKVVDELVKVMGRHKPENIVIEMARENQTTQKGQKNSRERMKRIEEGIKELGGSSGSETPGTSESATPESSGSEVEFSHEYWMRHALTLAKRARDEREVPVGAVLVLNNRVIGEGWNRAIGLHDPTAHAEIMALRQGGLVMQNYRLIDATLYVTFEPCVMCAGAMIHSRIGRVVFGVRNAKTGAAGSLMDVLHYPGMNHRVEITEGILADECAALLCYFFRMPRQSQILKEHPVENTQLQNEKLYLYYLQNGRDMYVDQELDINRLSDYDVDHIVPQSFLKDDSIDNKVLTRSDKNRGKSDNVPSEEVVKKMKNYWRQLLNAKLITQRKFDNLTKAERGGLSELDKAGFIKRQLVETRQITKHVAQILDSRMNTKYDENDKLIREVKVITLKSKLVSDFRKDFQFYKVREINNYHHAHDAYLNAVVGTALIKKYPKLESEFVYGDYKVYDVRKMIAKSEQEIGKATAKYFFYSNIMNFFKTEITLANGEIRKRPLIETNGETGEIVWDKGRDFATVRKVLSMPQVNIVKKTEVQTGGFSKESILPKRNSDKLIARKKDWDPKKYGGFDSPTVAYSVLVVAKVEKGKSKKLKSVKELLGITIMERSSFEKNPIDFLEAKGYKEVKKDLIIKLPKYSLFELENGRKRMLASAGELQKGNELALPSKYVNFLYLASHYEKLKGSPEDNEQKQLFVEQHKHYLDEIIEQISEFSKRVILADANLDKVLSAYNKHRDKPIREQAENIIHLFTLTNLGAPAAFKYFDTTIDRKRYTSTKEVLDATLIHQSITGLYETRIDLSQLGGD

SEQ ID NO: 291 - protein, 1541 aa, synthetic construct
  REGION 1..1541: note = 116.2 Cas9 TadAins C-term truncate 791 polypeptide sequence
MDKKYSIGLAIGTNSVGWAVITDEYKVPSKKFKVLGNTDRHSIKKNLIGALLFDSGETAEATRLKRTARRRYTRRKNRICYLQEIFSNEMAKVDDSFFHRLEESFLVEEDKKHERHPIFGNIVDEVAYHEKYPTIYHLRKKLVDSTDKADLRLIYLALAHMIKFRGHFLIEGDLNPDNSDVDKLFIQLVQTYNQLFEENPINASGVDAKAILSARLSKSRRLENLIAQLPGEKKNGLFGNLIALSLGLTPNFKSNFDLAEDAKLQLSKDTYDDDLDNLLAQIGDQYADLFLAAKNLSDAILLSDILRVNTEITKAPLSASMIKRYDEHHQDLTLLKALVRQQLPEKYKEIFFDQSKNGYAGYIDGGASQEEFYKFIKPILEKMDGTEELLVKLNREDLLRKQRTFDNGSIPHQIHLGELHAILRRQEDFYPFLKDNREKIEKILTFRIPYYVGPLARGNSRFAWMTRKSEETITPWNFEEVVDKGASAQSFIERMTNFDKNLPNEKVLPKHSLLYEYFTVYNELTKVKYVTEGMRKPAFLSGEQKKAIVDLLFKTNRKVTVKQLKEDYFKKIECFDSVEISGVEDRFNASLGTYHDLLKIIKDKDFLDNEENEDILEDIVLTLTLFEDREMIEERLKTYAHLFDDKVMKQLKRRRYTGWGRLSRKLINGIRDKQSGKTILDFLKSDGFANRNFMQLIHDDSLTFKEDIQKAQVSGQGDSLHEHIANLAGSPAIKKGILQTVKVVDELVKVMGRHKPENIVIEMARENQTTQKGQKNSRERMKRIEEGIKELGSSGSETPGTSESATPESSGSEVEFSHEYWMRHALTLAKRARDEREVPVGAVLVLNNRVIGEGWNRAIGLHDPTAHAEIMALRQGGLVMQNYRLIDATLYVTFEPCVMCAGAMIHSRIGRVVFGVRNAKTGAAGSLMDVLHYPGMNHRVEITEGILADECAALLCYFFRMPRQGSQILKEHPVENTQLQNEKLYLYYLQNGRDMYVDQELDINRLSDYDVDHIVPQSFLKDDSIDNKVLTRSDKNRGKSDNVPSEEVVKKMKNYWRQLLNAKLITQRKFDNLTKAERGGLSELDKAGFIKRQLVETRQITKHVAQILDSRMNTKYDENDKLIREVKVITLKSKLVSDFRKDFQFYKVREINNYHHAHDAYLNAVVGTALIKKYPKLESEFVYGDYKVYDVRKMIAKSEQEIGKATAKYFFYSNIMNFFKTEITLANGEIRKRPLIETNGETGEIVWDKGRDFATVRKVLSMPQVNIVKKTEVQTGGFSKESILPKRNSDKLIARKKDWDPKKYGGFDSPTVAYSVLVVAKVEKGKSKKLKSVKELLGITIMERSSFEKNPIDFLEAKGYKEVKKDLIIKLPKYSLFELENGRKRMLASAGELQKGNELALPSKYVNFLYLASHYEKLKGSPEDNEQKQLFVEQHKHYLDEIIEQISEFSKRVILADANLDKVLSAYNKHRDKPIREQAENIIHLFTLTNLGAPAAFKYFDTTIDRKRYTSTKEVLDATLIHQSITGLYETRIDLSQLGGD

SEQ ID NO: 292 - protein, 1541 aa, synthetic construct
  REGION 1..1541: note = 116.3 Cas9 TadAins C-term truncate 790 polypeptide sequence
MDKKYSIGLAIGTNSVGWAVITDEYKVPSKKFKVLGNTDRHSIKKNLIGALLFDSGETAEATRLKRTARRRYTRRKNRICYLQEIFSNEMAKVDDSFFHRLEESFLVEEDKKHERHPIFGNIVDEVAYHEKYPTIYHLRKKLVDSTDKADLRLIYLALAHMIKFRGHFLIEGDLNPDNSDVDKLFIQLVQTYNQLFEENPINASGVDAKAILSARLSKSRRLENLIAQLPGEKKNGLFGNLIALSLGLTPNFKSNFDLAEDAKLQLSKDTYDDDLDNLLAQIGDQYADLFLAAKNLSDAILLSDILRVNTEITKAPLSASMIKRYDEHHQDLTLLKALVRQQLPEKYKEIFFDQSKNGYAGYIDGGASQEEFYKFIKPILEKMDGTEELLVKLNREDLLRKQRTFDNGSIPHQIHLGELHAILRRQEDFYPFLKDNREKIEKILTFRIPYYVGPLARGNSRFAWMTRKSEETITPWNFEEVVDKGASAQSFIERMTNFDKNLPNEKVLPKHSLLYEYFTVYNELTKVKYVTEGMRKPAFLSGEQKKAIVDLLFKTNRKVTVKQLKEDYFKKIECFDSVEISGVEDRFNASLGTYHDLLKIIKDKDFLDNEENEDILEDIVLTLTLFEDREMIEERLKTYAHLFDDKVMKQLKRRRYTGWGRLSRKLINGIRDKQSGKTILDFLKSDGFANRNFMQLIHDDSLTFKEDIQKAQVSGQGDSLHEHIANLAGSPAIKKGILQTVKVVDELVKVMGRHKPENIVIEMARENQTTQKGQKNSRERMKRIEEGIKEGSSGSETPGTSESATPESSGSEVEFSHEYWMRHALTLAKRARDEREVPVGAVLVLNNRVIGEGWNRAIGLHDPTAHAEIMALRQGGLVMQNYRLIDATLYVTFEPCVMCAGAMIHSRIGRVVFGVRNAKTGAAGSLMDVLHYPGMNHRVEITEGILADECAALLCYFFRMPRQLGSQILKEHPVENTQLQNEKLYLYYLQNGRDMYVDQELDINRLSDYDVDHIVPQSFLKDDSIDNKVLTRSDKNRGKSDNVPSEEVVKKMKNYWRQLLNAKLITQRKFDNLTKAERGGLSELDKAGFIKRQLVETRQITKHVAQILDSRMNTKYDENDKLIREVKVITLKSKLVSDFRKDFQFYKVREINNYHHAHDAYLNAVVGTALIKKYPKLESEFVYGDYKVYDVRKMIAKSEQEIGKATAKYFFYSNIMNFFKTEITLANGEIRKRPLIETNGETGEIVWDKGRDFATVRKVLSMPQVNIVKKTEVQTGGFSKESILPKRNSDKLIARKKDWDPKKYGGFDSPTVAYSVLVVAKVEKGKSKKLKSVKELLGITIMERSSFEKNPIDFLEAKGYKEVKKDLIIKLPKYSLFELENGRKRMLASAGELQKGNELALPSKYVNFLYLASHYEKLKGSPEDNEQKQLFVEQHKHYLDEIIEQISEFSKRVILADANLDKVLSAYNKHRDKPIREQAENIIHLFTLTNLGAPAAFKYFDTTIDRKRYTSTKEVLDATLIHQSITGLYETRIDLSQLGGD

SEQ ID NO: 293 - protein, 1484 aa, synthetic construct
  REGION 1..1484: note = 117 Cas9 delta 1017-1069 polypeptide sequence
MDKKYSIGLAIGTNSVGWAVITDEYKVPSKKFKVLGNTDRHSIKKNLIGALLFDSGETAEATRLKRTARRRYTRRKNRICYLQEIFSNEMAKVDDSFFHRLEESFLVEEDKKHERHPIFGNIVDEVAYHEKYPTIYHLRKKLVDSTDKADLRLIYLALAHMIKFRGHFLIEGDLNPDNSDVDKLFIQLVQTYNQLFEENPINASGVDAKAILSARLSKSRRLENLIAQLPGEKKNGLFGNLIALSLGLTPNFKSNFDLAEDAKLQLSKDTYDDDLDNLLAQIGDQYADLFLAAKNLSDAILLSDILRVNTEITKAPLSASMIKRYDEHHQDLTLLKALVRQQLPEKYKEIFFDQSKNGYAGYIDGGASQEEFYKFIKPILEKMDGTEELLVKLNREDLLRKQRTFDNGSIPHQIHLGELHAILRRQEDFYPFLKDNREKIEKILTFRIPYYVGPLARGNSRFAWMTRKSEETITPWNFEEVVDKGASAQSFIERMTNFDKNLPNEKVLPKHSLLYEYFTVYNELTKVKYVTEGMRKPAFLSGEQKKAIVDLLFKTNRKVTVKQLKEDYFKKIECFDSVEISGVEDRFNASLGTYHDLLKIIKDKDFLDNEENEDILEDIVLTLTLFEDREMIEERLKTYAHLFDDKVMKQLKRRRYTGWGRLSRKLINGIRDKQSGKTILDFLKSDGFANRNFMQLIHDDSLTFKEDIQKAQVSGQGDSLHEHIANLAGSPAIKKGILQTVKVVDELVKVMGRHKPENIVIEMARENQTTQKGQKNSRERMKRIEEGIKELGSQILKEHPVENTQLQNEKLYLYYLQNGRDMYVDQELDINRLSDYDVDHIVPQSFLKDDSIDNKVLTRSDKNRGKSDNVPSEEVVKKMKNYWRQLLNAKLITQRKFDNLTKAERGGLSELDKAGFIKRQLVETRQITKHVAQILDSRMNTKYDENDKLIREVKVITLKSKLVSDFRKDFQFYKVREINNYHHAHDAYLNAVVGTALIKKYPKLESEFVYGDYKVYSSGSEVEFSHEYWMRHALTLAKRARDEREVPVGAVLVLNNRVIGEGWNRAIGLHDPTAHAEIMALRQGGLVMQNYRLIDATLYVTFEPCVMCAGAMIHSRIGRVVFGVRNAKTGAAGSLMDVLHYPGMNHRVEITEGILADECAALLCYFFRMPRQVFNAQKKAQSSTDGEIVWDKGRDFATVRKVLSMPQVNIVKKTEVQTGGFSKESILPKRNSDKLIARKKDWDPKKYGGFDSPTVAYSVLVVAKVEKGKSKKLKSVKELLGITIMERSSFEKNPIDFLEAKGYKEVKKDLIIKLPKYSLFELENGRKRMLASAGELQKGNELALPSKYVNFLYLASHYEKLKGSPEDNEQKQLFVEQHKHYLDEIIEQISEFSKRVILADANLDKVLSAYNKHRDKPIREQAENIIHLFTLTNLGAPAAFKYFDTTIDRKRYTSTKEVLDATLIHQSITGLYETRIDLSQLGGD

SEQ ID NO: 294 - protein, 1554 aa, synthetic construct
  REGION 1..1554: note = 118 Cas9 TadA-CP116ins 1067 polypeptide sequence
MDKKYSIGLAIGTNSVGWAVITDEYKVPSKKFKVLGNTDRHSIKKNLIGALLFDSGETAEATRLKRTARRRYTRRKNRICYLQEIFSNEMAKVDDSFFHRLEESFLVEEDKKHERHPIFGNIVDEVAYHEKYPTIYHLRKKLVDSTDKADLRLIYLALAHMIKFRGHFLIEGDLNPDNSDVDKLFIQLVQTYNQLFEENPINASGVDAKAILSARLSKSRRLENLIAQLPGEKKNGLFGNLIALSLGLTPNFKSNFDLAEDAKLQLSKDTYDDDLDNLLAQIGDQYADLFLAAKNLSDAILLSDILRVNTEITKAPLSASMIKRYDEHHQDLTLLKALVRQQLPEKYKEIFFDQSKNGYAGYIDGGASQEEFYKFIKPILEKMDGTEELLVKLNREDLLRKQRTFDNGSIPHQIHLGELHAILRRQEDFYPFLKDNREKIEKILTFRIPYYVGPLARGNSRFAWMTRKSEETITPWNFEEVVDKGASAQSFIERMTNFDKNLPNEKVLPKHSLLYEYFTVYNELTKVKYVTEGMRKPAFLSGEQKKAIVDLLFKTNRKVTVKQLKEDYFKKIECFDSVEISGVEDRFNASLGTYHDLLKIIKDKDFLDNEENEDILEDIVLTLTLFEDREMIEERLKTYAHLFDDKVMKQLKRRRYTGWGRLSRKLINGIRDKQSGKTILDFLKSDGFANRNFMQLIHDDSLTFKEDIQKAQVSGQGDSLHEHIANLAGSPAIKKGILQTVKVVDELVKVMGRHKPENIVIEMARENQTTQKGQKNSRERMKRIEEGIKELGSQILKEHPVENTQLQNEKLYLYYLQNGRDMYVDQELDINRLSDYDVDHIVPQSFLKDDSIDNKVLTRSDKNRGKSDNVPSEEVVKKMKNYWRQLLNAKLITQRKFDNLTKAERGGLSELDKAGFIKRQLVETRQITKHVAQILDSRMNTKYDENDKLIREVKVITLKSKLVSDFRKDFQFYKVREINNYHHAHDAYLNAVVGTALIKKYPKLESEFVYGDYKVYDVRKMIAKSEQEIGKATAKYFFYSNIMNFFKTEITLANGEIRKRPLIETNMNHRVEITEGILADECAALLCYFFRMPRQVFNAQKKAQSSTDGSSGSETPGTSESATPESSGSEVEFSHEYWMRHALTLAKRARDEREVPVGAVLVLNNRVIGEGWNRAIGLHDPTAHAEIMALRQGGLVMQNYRLIDATLYVTFEPCVMCAGAMIHSRIGRVVFGVRNAKTGAAGSLMDVLHYPGGETGEIVWDKGRDFATVRKVLSMPQVNIVKKTEVQTGGFSKESILPKRNSDKLIARKKDWDPKKYGGFDSPTVAYSVLVVAKVEKGKSKKLKSVKELLGITIMERSSFEKNPIDFLEAKGYKEVKKDLIIKLPKYSLFELENGRKRMLASAGELQKGNELALPSKYVNFLYLASHYEKLKGSPEDNEQKQLFVEQHKHYLDEIIEQISEFSKRVILADANLDKVLSAYNKHRDKPIREQAENIIHLFTLTNLGAPAAFKYFDTTIDRKRYTSTKEVLDATLIHQSITGLYETRIDLSQLGGD

SEQ ID NO: 295 - protein, 1554 aa, synthetic construct
  REGION 1..1554: note = 119 Cas9 TadAins 701 polypeptide sequence
MDKKYSIGLAIGTNSVGWAVITDEYKVPSKKFKVLGNTDRHSIKKNLIGALLFDSGETAEATRLKRTARRRYTRRKNRICYLQEIFSNEMAKVDDSFFHRLEESFLVEEDKKHERHPIFGNIVDEVAYHEKYPTIYHLRKKLVDSTDKADLRLIYLALAHMIKFRGHFLIEGDLNPDNSDVDKLFIQLVQTYNQLFEENPINASGVDAKAILSARLSKSRRLENLIAQLPGEKKNGLFGNLIALSLGLTPNFKSNFDLAEDAKLQLSKDTYDDDLDNLLAQIGDQYADLFLAAKNLSDAILLSDILRVNTEITKAPLSASMIKRYDEHHQDLTLLKALVRQQLPEKYKEIFFDQSKNGYAGYIDGGASQEEFYKFIKPILEKMDGTEELLVKLNREDLLRKQRTFDNGSIPHQIHLGELHAILRRQEDFYPFLKDNREKIEKILTFRIPYYVGPLARGNSRFAWMTRKSEETITPWNFEEVVDKGASAQSFIERMTNFDKNLPNEKVLPKHSLLYEYFTVYNELTKVKYVTEGMRKPAFLSGEQKKAIVDLLFKTNRKVTVKQLKEDYFKKIECFDSVEISGVEDRFNASLGTYHDLLKIIKDKDFLDNEENEDILEDIVLTLTLFEDREMIEERLKTYAHLFDDKVMKQLKRRRYTGWGRLSRKLINGIRDKQSGKTILDFLKSDGFANRNFMQLIHDDSGSSGSETPGTSESATPESSGSEVEFSHEYWMRHALTLAKRARDEREVPVGAVLVLNNRVIGEGWNRAIGLHDPTAHAEIMALRQGGLVMQNYRLIDATLYVTFEPCVMCAGAMIHSRIGRVVFGVRNAKTGAAGSLMDVLHYPGMNHRVEITEGILADECAALLCYFFRMPRQVFNAQKKAQSSTDLTFKEDIQKAQVSGQGDSLHEHIANLAGSPAIKKGILQTVKVVDELVKVMGRHKPENIVIEMARENQTTQKGQKNSRERMKRIEEGIKELGSQILKEHPVENTQLQNEKLYLYYLQNGRDMYVDQELDINRLSDYDVDHIVPQSFLKDDSIDNKVLTRSDKNRGKSDNVPSEEVVKKMKNYWRQLLNAKLITQRKFDNLTKAERGGLSELDKAGFIKRQLVETRQITKHVAQILDSRMNTKYDENDKLIREVKVITLKSKLVSDFRKDFQFYKVREINNYHHAHDAYLNAVVGTALIKKYPKLESEFVYGDYKVYDVRKMIAKSEQEIGKATAKYFFYSNIMNFFKTEITLANGEIRKRPLIETNGETGEIVWDKGRDFATVRKVLSMPQVNIVKKTEVQTGGFSKESILPKRNSDKLIARKKDWDPKKYGGFDSPTVAYSVLVVAKVEKGKSKKLKSVKELLGITIMERSSFEKNPIDFLEAKGYKEVKKDLIIKLPKYSLFELENGRKRMLASAGELQKGNELALPSKYVNFLYLASHYEKLKGSPEDNEQKQLFVEQHKHYLDEIIEQISEFSKRVILADANLDKVLSAYNKHRDKPIREQAENIIHLFTLTNLGAPAAFKYFDTTIDRKRYTSTKEVLDATLIHQSITGLYETRIDLSQLGGD

SEQ ID NO: 296 - protein, 1554 aa, synthetic construct
  REGION 1..1554: note = 120 Cas9 TadACP136ins 1248 polypeptide sequence
MDKKYSIGLAIGTNSVGWAVITDEYKVPSKKFKVLGNTDRHSIKKNLIGALLFDSGETAEATRLKRTARRRYTRRKNRICYLQEIFSNEMAKVDDSFFHRLEESFLVEEDKKHERHPIFGNIVDEVAYHEKYPTIYHLRKKLVDSTDKADLRLIYLALAHMIKFRGHFLIEGDLNPDNSDVDKLFIQLVQTYNQLFEENPINASGVDAKAILSARLSKSRRLENLIAQLPGEKKNGLFGNLIALSLGLTPNFKSNFDLAEDAKLQLSKDTYDDDLDNLLAQIGDQYADLFLAAKNLSDAILLSDILRVNTEITKAPLSASMIKRYDEHHQDLTLLKALVRQQLPEKYKEIFFDQSKNGYAGYIDGGASQEEFYKFIKPILEKMDGTEELLVKLNREDLLRKQRTFDNGSIPHQIHLGELHAILRRQEDFYPFLKDNREKIEKILTFRIPYYVGPLARGNSRFAWMTRKSEETITPWNFEEVVDKGASAQSFIERMTNFDKNLPNEKVLPKHSLLYEYFTVYNELTKVKYVTEGMRKPAFLSGEQKKAIVDLLFKTNRKVTVKQLKEDYFKKIECFDSVEISGVEDRFNASLGTYHDLLKIIKDKDFLDNEENEDILEDIVLTLTLFEDREMIEERLKTYAHLFDDKVMKQLKRRRYTGWGRLSRKLINGIRDKQSGKTILDFLKSDGFANRNFMQLIHDDSLTFKEDIQKAQVSGQGDSLHEHIANLAGSPAIKKGILQTVKVVDELVKVMGRHKPENIVIEMARENQTTQKGQKNSRERMKRIEEGIKELGSQILKEHPVENTQLQNEKLYLYYLQNGRDMYVDQELDINRLSDYDVDHIVPQSFLKDDSIDNKVLTRSDKNRGKSDNVPSEEVVKKMKNYWRQLLNAKLITQRKFDNLTKAERGGLSELDKAGFIKRQLVETRQITKHVAQILDSRMNTKYDENDKLIREVKVITLKSKLVSDFRKDFQFYKVREINNYHHAHDAYLNAVVGTALIKKYPKLESEFVYGDYKVYDVRKMIAKSEQEIGKATAKYFFYSNIMNFFKTEITLANGEIRKRPLIETNGETGEIVWDKGRDFATVRKVLSMPQVNIVKKTEVQTGGFSKESILPKRNSDKLIARKKDWDPKKYGGFDSPTVAYSVLVVAKVEKGKSKKLKSVKELLGITIMERSSFEKNPIDFLEAKGYKEVKKDLIIKLPKYSLFELENGRKRMLASAGELQKGNELALPSKYVNFLYLASHYEKLKGSMNHRVEITEGILADECAALLCYFFRMPRQVFNAQKKAQSSTDGSSGSETPGTSESATPESSGSEVEFSHEYWMRHALTLAKRARDEREVPVGAVLVLNNRVIGEGWNRAIGLHDPTAHAEIMALRQGGLVMQNYRLIDATLYVTFEPCVMCAGAMIHSRIGRVVFGVRNAKTGAAGSLMDVLHYPGPEDNEQKQLFVEQHKHYLDEIIEQISEFSKRVILADANLDKVLSAYNKHRDKPIREQAENIIHLFTLTNLGAPAAFKYFDTTIDRKRYTSTKEVLDATLIHQSITGLYETRIDLSQLGGD

SEQ ID NO: 297 - protein, 1554 aa, synthetic construct
  REGION 1..1554: note = 121 Cas9 TadACP136ins 1052 polypeptide sequence
MDKKYSIGLAIGTNSVGWAVITDEYKVPSKKFKVLGNTDRHSIKKNLIGALLFDSGETAEATRLKRTARRRYTRRKNRICYLQEIFSNEMAKVDDSFFHRLEESFLVEEDKKHERHPIFGNIVDEVAYHEKYPTIYHLRKKLVDSTDKADLRLIYLALAHMIKFRGHFLIEGDLNPDNSDVDKLFIQLVQTYNQLFEENPINASGVDAKAILSARLSKSRRLENLIAQLPGEKKNGLFGNLIALSLGLTPNFKSNFDLAEDAKLQLSKDTYDDDLDNLLAQIGDQYADLFLAAKNLSDAILLSDILRVNTEITKAPLSASMIKRYDEHHQDLTLLKALVRQQLPEKYKEIFFDQSKNGYAGYIDGGASQEEFYKFIKPILEKMDGTEELLVKLNREDLLRKQRTFDNGSIPHQIHLGELHAILRRQEDFYPFLKDNREKIEKILTFRIPYYVGPLARGNSRFAWMTRKSEETITPWNFEEVVDKGASAQSFIERMTNFDKNLPNEKVLPKHSLLYEYFTVYNELTKVKYVTEGMRKPAFLSGEQKKAIVDLLFKTNRKVTVKQLKEDYFKKIECFDSVEISGVEDRFNASLGTYHDLLKIIKDKDFLDNEENEDILEDIVLTLTLFEDREMIEERLKTYAHLFDDKVMKQLKRRRYTGWGRLSRKLINGIRDKQSGKTILDFLKSDGFANRNFMQLIHDDSLTFKEDIQKAQVSGQGDSLHEHIANLAGSPAIKKGILQTVKVVDELVKVMGRHKPENIVIEMARENQTTQKGQKNSRERMKRIEEGIKELGSQILKEHPVENTQLQNEKLYLYYLQNGRDMYVDQELDINRLSDYDVDHIVPQSFLKDDSIDNKVLTRSDKNRGKSDNVPSEEVVKKMKNYWRQLLNAKLITQRKFDNLTKAERGGLSELDKAGFIKRQLVETRQITKHVAQILDSRMNTKYDENDKLIREVKVITLKSKLVSDFRKDFQFYKVREINNYHHAHDAYLNAVVGTALIKKYPKLESEFVYGDYKVYDVRKMIAKSEQEIGKATAKYFFYSNIMNFFKTEITLAMNHRVEITEGILADECAALLCYFFRMPRQVFNAQKKAQSSTDGSSGSETPGTSESATPESSGSEVEFSHEYWMRHALTLAKRARDEREVPVGAVLVLNNRVIGEGWNRAIGLHDPTAHAEIMALRQGGLVMQNYRLIDATLYVTFEPCVMCAGAMIHSRIGRVVFGVRNAKTGAAGSLMDVLHYPGNGEIRKRPLIETNGETGEIVWDKGRDFATVRKVLSMPQVNIVKKTEVQTGGFSKESILPKRNSDKLIARKKDWDPKKYGGFDSPTVAYSVLVVAKVEKGKSKKLKSVKELLGITIMERSSFEKNPIDFLEAKGYKEVKKDLIIKLPKYSLFELENGRKRMLASAGELQKGNELALPSKYVNFLYLASHYEKLKGSPEDNEQKQLFVEQHKHYLDEIIEQISEFSKRVILADANLDKVLSAYNKHRDKPIREQAENIIHLFTLTNLGAPAAFKYFDTTIDRKRYTSTKEVLDATLIHQSITGLYETRIDLSQLGGD

SEQ ID NO: 298 - protein, 1554 aa, synthetic construct
  REGION 1..1554: note = 122 Cas9 TadACP136ins 1041 polypeptide sequence
MDKKYSIGLAIGTNSVGWAVITDEYKVPSKKFKVLGNTDRHSIKKNLIGALLFDSGETAEATRLKRTARRRYTRRKNRICYLQEIFSNEMAKVDDSFFHRLEESFLVEEDKKHERHPIFGNIVDEVAYHEKYPTIYHLRKKLVDSTDKADLRLIYLALAHMIKFRGHFLIEGDLNPDNSDVDKLFIQLVQTYNQLFEENPINASGVDAKAILSARLSKSRRLENLIAQLPGEKKNGLFGNLIALSLGLTPNFKSNFDLAEDAKLQLSKDTYDDDLDNLLAQIGDQYADLFLAAKNLSDAILLSDILRVNTEITKAPLSASMIKRYDEHHQDLTLLKALVRQQLPEKYKEIFFDQSKNGYAGYIDGGASQEEFYKFIKPILEKMDGTEELLVKLNREDLLRKQRTFDNGSIPHQIHLGELHAILRRQEDFYPFLKDNREKIEKILTFRIPYYVGPLARGNSRFAWMTRKSEETITPWNFEEVVDKGASAQSFIERMTNFDKNLPNEKVLPKHSLLYEYFTVYNELTKVKYVTEGMRKPAFLSGEQKKAIVDLLFKTNRKVTVKQLKEDYFKKIECFDSVEISGVEDRFNASLGTYHDLLKIIKDKDFLDNEENEDILEDIVLTLTLFEDREMIEERLKTYAHLFDDKVMKQLKRRRYTGWGRLSRKLINGIRDKQSGKTILDFLKSDGFANRNFMQLIHDDSLTFKEDIQKAQVSGQGDSLHEHIANLAGSPAIKKGILQTVKVVDELVKVMGRHKPENIVIEMARENQTTQKGQKNSRERMKRIEEGIKELGSQILKEHPVENTQLQNEKLYLYYLQNGRDMYVDQELDINRLSDYDVDHIVPQSFLKDDSIDNKVLTRSDKNRGKSDNVPSEEVVKKMKNYWRQLLNAKLITQRKFDNLTKAERGGLSELDKAGFIKRQLVETRQITKHVAQILDSRMNTKYDENDKLIREVKVITLKSKLVSDFRKDFQFYKVREINNYHHAHDAYLNAVVGTALIKKYPKLESEFVYGDYKVYDVRKMIAKSEQEIGKATAKYFFYSMNHRVEITEGILADECAALLCYFFRMPRQVFNAQKKAQSSTDGSSGSETPGTSESATPESSGSEVEFSHEYWMRHALTLAKRARDEREVPVGAVLVLNNRVIGEGWNRAIGLHDPTAHAEIMALRQGGLVMQNYRLIDATLYVTFEPCVMCAGAMIHSRIGRVVFGVRNAKTGAAGSLMDVLHYPGNIMNFFKTEITLANGEIRKRPLIETNGETGEIVWDKGRDFATVRKVLSMPQVNIVKKTEVQTGGFSKESILPKRNSDKLIARKKDWDPKKYGGFDSPTVAYSVLVVAKVEKGKSKKLKSVKELLGITIMERSSFEKNPIDFLEAKGYKEVKKDLIIKLPKYSLFELENGRKRMLASAGELQKGNELALPSKYVNFLYLASHYEKLKGSPEDNEQKQLFVEQHKHYLDEIIEQISEFSKRVILADANLDKVLSAYNKHRDKPIREQAENIIHLFTLTNLGAPAAFKYFDTTIDRKRYTSTKEVLDATLIHQSITGLYETRIDLSQLGGD

SEQ ID NO: 299 - protein, 1554 aa, synthetic construct
  REGION 1..1554: note = 123 Cas9 TadACP139ins 1299 polypeptide sequence
MDKKYSIGLAIGTNSVGWAVITDEYKVPSKKFKVLGNTDRHSIKKNLIGALLFDSGETAEATRLKRTARRRYTRRKNRICYLQEIFSNEMAKVDDSFFHRLEESFLVEEDKKHERHPIFGNIVDEVAYHEKYPTIYHLRKKLVDSTDKADLRLIYLALAHMIKFRGHFLIEGDLNPDNSDVDKLFIQLVQTYNQLFEENPINASGVDAKAILSARLSKSRRLENLIAQLPGEKKNGLFGNLIALSLGLTPNFKSNFDLAEDAKLQLSKDTYDDDLDNLLAQIGDQYADLFLAAKNLSDAILLSDILRVNTEITKAPLSASMIKRYDEHHQDLTLLKALVRQQLPEKYKEIFFDQSKNGYAGYIDGGASQEEFYKFIKPILEKMDGTEELLVKLNREDLLRKQRTFDNGSIPHQIHLGELHAILRRQEDFYPFLKDNREKIEKILTFRIPYYVGPLARGNSRFAWMTRKSEETITPWNFEEVVDKGASAQSFIERMTNFDKNLPNEKVLPKHSLLYEYFTVYNELTKVKYVTEGMRKPAFLSGEQKKAIVDLLFKTNRKVTVKQLKEDYFKKIECFDSVEISGVEDRFNASLGTYHDLLKIIKDKDFLDNEENEDILEDIVLTLTLFEDREMIEERLKTYAHLFDDKVMKQLKRRRYTGWGRLSRKLINGIRDKQSGKTILDFLKSDGFANRNFMQLIHDDSLTFKEDIQKAQVSGQGDSLHEHIANLAGSPAIKKGILQTVKVVDELVKVMGRHKPENIVIEMARENQTTQKGQKNSRERMKRIEEGIKELGSQILKEHPVENTQLQNEKLYLYYLQNGRDMYVDQELDINRLSDYDVDHIVPQSFLKDDSIDNKVLTRSDKNRGKSDNVPSEEVVKKMKNYWRQLLNAKLITQRKFDNLTKAERGGLSELDKAGFIKRQLVETRQITKHVAQILDSRMNTKYDENDKLIREVKVITLKSKLVSDFRKDFQFYKVREINNYHHAHDAYLNAVVGTALIKKYPKLESEFVYGDYKVYDVRKMIAKSEQEIGKATAKYFFYSNIMNFFKTEITLANGEIRKRPLIETNGETGEIVWDKGRDFATVRKVLSMPQVNIVKKTEVQTGGFSKESILPKRNSDKLIARKKDWDPKKYGGFDSPTVAYSVLVVAKVEKGKSKKLKSVKELLGITIMERSSFEKNPIDFLEAKGYKEVKKDLIIKLPKYSLFELENGRKRMLASAGELQKGNELALPSKYVNFLYLASHYEKLKGSPEDNEQKQLFVEQHKHYLDEIIEQISEFSKRVILADANLDKVLSAYNKHRMNHRVEITEGILADECAALLCYFFRMPRQVFNAQKKAQSSTDGSSGSETPGTSESATPESSGSEVEFSHEYWMRHALTLAKRARDEREVPVGAVLVLNNRVIGEGWNRAIGLHDPTAHAEIMALRQGGLVMQNYRLIDATLYVTFEPCVMCAGAMIHSRIGRVVFGVRNAKTGAAGSLMDVLHYPGDKPIREQAENIIHLFTLTNLGAPAAFKYFDTTIDRKRYTSTKEVLDATLIHQSITGLYETRIDLSQLGGD

SEQ ID NO: 300 - protein, 1454 aa, synthetic construct
  REGION 1..1454: note = 124 Cas9 delta 792-872TadAins polypeptide sequence
MDKKYSIGLAIGTNSVGWAVITDEYKVPSKKFKVLGNTDRHSIKKNLIGALLFDSGETAEATRLKRTARRRYTRRKNRICYLQEIFSNEMAKVDDSFFHRLEESFLVEEDKKHERHPIFGNIVDEVAYHEKYPTIYHLRKKLVDSTDKADLRLIYLALAHMIKFRGHFLIEGDLNPDNSDVDKLFIQLVQTYNQLFEENPINASGVDAKAILSARLSKSRRLENLIAQLPGEKKNGLFGNLIALSLGLTPNFKSNFDLAEDAKLQLSKDTYDDDLDNLLAQIGDQYADLFLAAKNLSDAILLSDILRVNTEITKAPLSASMIKRYDEHHQDLTLLKALVRQQLPEKYKEIFFDQSKNGYAGYIDGGASQEEFYKFIKPILEKMDGTEELLVKLNREDLLRKQRTFDNGSIPHQIHLGELHAILRRQEDFYPFLKDNREKIEKILTFRIPYYVGPLARGNSRFAWMTRKSEETITPWNFEEVVDKGASAQSFIERMTNFDKNLPNEKVLPKHSLLYEYFTVYNELTKVKYVTEGMRKPAFLSGEQKKAIVDLLFKTNRKVTVKQLKEDYFKKIECFDSVEISGVEDRFNASLGTYHDLLKIIKDKDFLDNEENEDILEDIVLTLTLFEDREMIEERLKTYAHLFDDKVMKQLKRRRYTGWGRLSRKLINGIRDKQSGKTILDFLKSDGFANRNFMQLIHDDSLTFKEDIQKAQVSGQGDSLHEHIANLAGSPAIKKGILQTVKVVDELVKVMGRHKPENIVIEMARENQTTQKGQKNSRERMKRIEEGIKELGSEVEFSHEYWMRHALTLAKRARDEREVPVGAVLVLNNRVIGEGWNRAIGLHDPTAHAEIMALRQGGLVMQNYRLIDATLYVTFEPCVMCAGAMIHSRIGRVVFGVRNAKTGAAGSLMDVLHYPGMNHRVEITEGILADECAALLCYFFRMPRQVFNAQKKAQSSTDEEVVKKMKNYWRQLLNAKLITQRKFDNLTKAERGGLSELDKAGFIKRQLVETRQITKHVAQILDSRMNTKYDENDKLIREVKVITLKSKLVSDFRKDFQFYKVREINNYHHAHDAYLNAVVGTALIKKYPKLESEFVYGDYKVYDVRKMIAKSEQEIGKATAKYFFYSNIMNFFKTEITLANGEIRKRPLIETNGETGEIVWDKGRDFATVRKVLSMPQVNIVKKTEVQTGGFSKESILPKRNSDKLIARKKDWDPKKYGGFDSPTVAYSVLVVAKVEKGKSKKLKSVKELLGITIMERSSFEKNPIDFLEAKGYKEVKKDLIIKLPKYSLFELENGRKRMLASAGELQKGNELALPSKYVNFLYLASHYEKLKGSPEDNEQKQLFVEQHKHYLDEIIEQISEFSKRVILADANLDKVLSAYNKHRDKPIREQAENIIHLFTLTNLGAPAAFKYFDTTIDRKRYTSTKEVLDATLIHQSITGLYETRIDLSQLGGD

SEQ ID NO: 301 - protein, 1420 aa, synthetic construct
  REGION 1..1420: note = 125 Cas9 delta 792-906TadAins polypeptide sequence
MDKKYSIGLAIGTNSVGWAVITDEYKVPSKKFKVLGNTDRHSIKKNLIGALLFDSGETAEATRLKRTARRRYTRRKNRICYLQEIFSNEMAKVDDSFFHRLEESFLVEEDKKHERHPIFGNIVDEVAYHEKYPTIYHLRKKLVDSTDKADLRLIYLALAHMIKFRGHFLIEGDLNPDNSDVDKLFIQLVQTYNQLFEENPINASGVDAKAILSARLSKSRRLENLIAQLPGEKKNGLFGNLIALSLGLTPNFKSNFDLAEDAKLQLSKDTYDDDLDNLLAQIGDQYADLFLAAKNLSDAILLSDILRVNTEITKAPLSASMIKRYDEHHQDLTLLKALVRQQLPEKYKEIFFDQSKNGYAGYIDGGASQEEFYKFIKPILEKMDGTEELLVKLNREDLLRKQRTFDNGSIPHQIHLGELHAILRRQEDFYPFLKDNREKIEKILTFRIPYYVGPLARGNSRFAWMTRKSEETITPWNFEEVVDKGASAQSFIERMTNFDKNLPNEKVLPKHSLLYEYFTVYNELTKVKYVTEGMRKPAFLSGEQKKAIVDLLFKTNRKVTVKQLKEDYFKKIECFDSVEISGVEDRFNASLGTYHDLLKIIKDKDFLDNEENEDILEDIVLTLTLFEDREMIEERLKTYAHLFDDKVMKQLKRRRYTGWGRLSRKLINGIRDKQSGKTILDFLKSDGFANRNFMQLIHDDSLTFKEDIQKAQVSGQGDSLHEHIANLAGSPAIKKGILQTVKVVDELVKVMGRHKPENIVIEMARENQTTQKGQKNSRERMKRIEEGIKELGSEVEFSHEYWMRHALTLAKRARDEREVPVGAVLVLNNRVIGEGWNRAIGLHDPTAHAEIMALRQGGLVMQNYRLIDATLYVTFEPCVMCAGAMIHSRIGRVVFGVRNAKTGAAGSLMDVLHYPGMNHRVEITEGILADECAALLCYFFRMPRQVFNAQKKAQSSTDGLSELDKAGFIKRQLVETRQITKHVAQILDSRMNTKYDENDKLIREVKVITLKSKLVSDFRKDFQFYKVREINNYHHAHDAYLNAVVGTALIKKYPKLESEFVYGDYKVYDVRKMIAKSEQEIGKATAKYFFYSNIMNFFKTEITLANGEIRKRPLIETNGETGEIVWDKGRDFATVRKVLSMPQVNIVKKTEVQTGGFSKESILPKRNSDKLIARKKDWDPKKYGGFDSPTVAYSVLVVAKVEKGKSKKLKSVKELLGITIMERSSFEKNPIDFLEAKGYKEVKKDLIIKLPKYSLFELENGRKRMLASAGELQKGNELALPSKYVNFLYLASHYEKLKGSPEDNEQKQLFVEQHKHYLDEIIEQISEFSKRVILADANLDKVLSAYNKHRDKPIREQAENIIHLFTLTNLGAPAAFKYFDTTIDRKRYTSTKEVLDATLIHQSITGLYETRIDLSQLGGD

SEQ ID NO: 302 - protein, 1554 aa, synthetic construct
  REGION 1..1554: note = 126 TadA CP65ins 1003 polypeptide sequence
MDKKYSIGLAIGTNSVGWAVITDEYKVPSKKFKVLGNTDRHSIKKNLIGALLFDSGETAEATRLKRTARRRYTRRKNRICYLQEIFSNEMAKVDDSFFHRLEESFLVEEDKKHERHPIFGNIVDEVAYHEKYPTIYHLRKKLVDSTDKADLRLIYLALAHMIKFRGHFLIEGDLNPDNSDVDKLFIQLVQTYNQLFEENPINASGVDAKAILSARLSKSRRLENLIAQLPGEKKNGLFGNLIALSLGLTPNFKSNFDLAEDAKLQLSKDTYDDDLDNLLAQIGDQYADLFLAAKNLSDAILLSDILRVNTEITKAPLSASMIKRYDEHHQDLTLLKALVRQQLPEKYKEIFFDQSKNGYAGYIDGGASQEEFYKFIKPILEKMDGTEELLVKLNREDLLRKQRTFDNGSIPHQIHLGELHAILRRQEDFYPFLKDNREKIEKILTFRIPYYVGPLARGNSRFAWMTRKSEETITPWNFEEVVDKGASAQSFIERMTNFDKNLPNEKVLPKHSLLYEYFTVYNELTKVKYVTEGMRKPAFLSGEQKKAIVDLLFKTNRKVTVKQLKEDYFKKIECFDSVEISGVEDRFNASLGTYHDLLKIIKDKDFLDNEENEDILEDIVLTLTLFEDREMIEERLKTYAHLFDDKVMKQLKRRRYTGWGRLSRKLINGIRDKQSGKTILDFLKSDGFANRNFMQLIHDDSLTFKEDIQKAQVSGQGDSLHEHIANLAGSPAIKKGILQTVKVVDELVKVMGRHKPENIVIEMARENQTTQKGQKNSRERMKRIEEGIKELGSQILKEHPVENTQLQNEKLYLYYLQNGRDMYVDQELDINRLSDYDVDHIVPQSFLKDDSIDNKVLTRSDKNRGKSDNVPSEEVVKKMKNYWRQLLNAKLITQRKFDNLTKAERGGLSELDKAGFIKRQLVETRQITKHVAQILDSRMNTKYDENDKLIREVKVITLKSKLVSDFRKDFQFYKVREINNYHHAHDAYLNAVVGTALIKKYPKTAHAEIMALRQGGLVMQNYRLIDATLYVTFEPCVMCAGAMIHSRIGRVVFGVRNAKTGAAGSLMDVLHYPGMNHRVEITEGILADECAALLCYFFRMPRQVFNAQKKAQSSTDGSSGSETPGTSESATPESSGSEVEFSHEYWMRHALTLAKRARDEREVPVGAVLVLNNRVIGEGWNRAIGLHDPLESEFVYGDYKVYDVRKMIAKSEQEIGKATAKYFFYSNIMNFFKTEITLANGEIRKRPLIETNGETGEIVWDKGRDFATVRKVLSMPQVNIVKKTEVQTGGFSKESILPKRNSDKLIARKKDWDPKKYGGFDSPTVAYSVLVVAKVEKGKSKKLKSVKELLGITIMERSSFEKNPIDFLEAKGYKEVKKDLIIKLPKYSLFELENGRKRMLASAGELQKGNELALPSKYVNFLYLASHYEKLKGSPEDNEQKQLFVEQHKHYLDEIIEQISEFSKRVILADANLDKVLSAYNKHRDKPIREQAENIIHLFTLTNLGAPAAFKYFDTTIDRKRYTSTKEVLDATLIHQSITGLYETRIDLSQLGGD

SEQ ID NO: 303 - protein, 1554 aa, synthetic construct
  REGION 1..1554: note = 127 TadA CP65ins 1016 polypeptide sequence
MDKKYSIGLAIGTNSVGWAVITDEYKVPSKKFKVLGNTDRHSIKKNLIGALLFDSGETAEATRLKRTARRRYTRRKNRICYLQEIFSNEMAKVDDSFFHRLEESFLVEEDKKHERHPIFGNIVDEVAYHEKYPTIYHLRKKLVDSTDKADLRLIYLALAHMIKFRGHFLIEGDLNPDNSDVDKLFIQLVQTYNQLFEENPINASGVDAKAILSARLSKSRRLENLIAQLPGEKKNGLFGNLIALSLGLTPNFKSNFDLAEDAKLQLSKDTYDDDLDNLLAQIGDQYADLFLAAKNLSDAILLSDILRVNTEITKAPLSASMIKRYDEHHQDLTLLKALVRQQLPEKYKEIFFDQSKNGYAGYIDGGASQEEFYKFIKPILEKMDGTEELLVKLNREDLLRKQRTFDNGSIPHQIHLGELHAILRRQEDFYPFLKDNREKIEKILTFRIPYYVGPLARGNSRFAWMTRKSEETITPWNFEEVVDKGASAQSFIERMTNFDKNLPNEKVLPKHSLLYEYFTVYNELTKVKYVTEGMRKPAFLSGEQKKAIVDLLFKTNRKVTVKQLKEDYFKKIECFDSVEISGVEDRFNASLGTYHDLLKIIKDKDFLDNEENEDILEDIVLTLTLFEDREMIEERLKTYAHLFDDKVMKQLKRRRYTGWGRLSRKLINGIRDKQSGKTILDFLKSDGFANRNFMQLIHDDSLTFKEDIQKAQVSGQGDSLHEHIANLAGSPAIKKGILQTVKVVDELVKVMGRHKPENIVIEMARENQTTQKGQKNSRERMKRIEEGIKELGSQILKEHPVENTQLQNEKLYLYYLQNGRDMYVDQELDINRLSDYDVDHIVPQSFLKDDSIDNKVLTRSDKNRGKSDNVPSEEVVKKMKNYWRQLLNAKLITQRKFDNLTKAERGGLSELDKAGFIKRQLVETRQITKHVAQILDSRMNTKYDENDKLIREVKVITLKSKLVSDFRKDFQFYKVREINNYHHAHDAYLNAVVGTALIKKYPKLESEFVYGDYKVTAHAEIMALRQGGLVMQNYRLIDATLYVTFEPCVMCAGAMIHSRIGRVVFGVRNAKTGAAGSLMDVLHYPGMNHRVEITEGILADECAALLCYFFRMPRQVFNAQKKAQSSTDGSSGSETPGTSESATPESSGSEVEFSHEYWMRHALTLAKRARDEREVPVGAVLVLNNRVIGEGWNRAIGLHDPYDVRKMIAKSEQEIGKATAKYFFYSNIMNFFKTEITLANGEIRKRPLIETNGETGEIVWDKGRDFATVRKVLSMPQVNIVKKTEVQTGGFSKESILPKRNSDKLIARKKDWDPKKYGGFDSPTVAYSVLVVAKVEKGKSKKLKSVKELLGITIMERSSFEKNPIDFLEAKGYKEVKKDLIIKLPKYSLFELENGRKRMLASAGELQKGNELALPSKYVNFLYLASHYEKLKGSPEDNEQKQLFVEQHKHYLDEIIEQISEFSKRVILADANLDKVLSAYNKHRDKPIREQAENIIHLFTLTNLGAPAAFKYFDTTIDRKRYTSTKEVLDATLIHQSITGLYETRIDLSQLGGD

SEQ ID NO: 304 - protein, 1554 aa, synthetic construct
  REGION 1..1554: note = 128 TadA CP65ins 1022 polypeptide sequence
MDKKYSIGLAIGTNSVGWAVITDEYKVPSKKFKVLGNTDRHSIKKNLIGALLFDSGETAEATRLKRTARRRYTRRKNRICYLQEIFSNEMAKVDDSFFHRLEESFLVEEDKKHERHPIFGNIVDEVAYHEKYPTIYHLRKKLVDSTDKADLRLIYLALAHMIKFRGHFLIEGDLNPDNSDVDKLFIQLVQTYNQLFEENPINASGVDAKAILSARLSKSRRLENLIAQLPGEKKNGLFGNLIALSLGLTPNFKSNFDLAEDAKLQLSKDTYDDDLDNLLAQIGDQYADLFLAAKNLSDAILLSDILRVNTEITKAPLSASMIKRYDEHHQDLTLLKALVRQQLPEKYKEIFFDQSKNGYAGYIDGGASQEEFYKFIKPILEKMDGTEELLVKLNREDLLRKQRTFDNGSIPHQIHLGELHAILRRQEDFYPFLKDNREKIEKILTFRIPYYVGPLARGNSRFAWMTRKSEETITPWNFEEVVDKGASAQSFIERMTNFDKNLPNEKVLPKHSLLYEYFTVYNELTKVKYVTEGMRKPAFLSGEQKKAIVDLLFKTNRKVTVKQLKEDYFKKIECFDSVEISGVEDRFNASLGTYHDLLKIIKDKDFLDNEENEDILEDIVLTLTLFEDREMIEERLKTYAHLFDDKVMKQLKRRRYTGWGRLSRKLINGIRDKQSGKTILDFLKSDGFANRNFMQLIHDDSLTFKEDIQKAQVSGQGDSLHEHIANLAGSPAIKKGILQTVKVVDELVKVMGRHKPENIVIEMARENQTTQKGQKNSRERMKRIEEGIKELGSQILKEHPVENTQLQNEKLYLYYLQNGRDMYVDQELDINRLSDYDVDHIVPQSFLKDDSIDNKVLTRSDKNRGKSDNVPSEEVVKKMKNYWRQLLNAKLITQRKFDNLTKAERGGLSELDKAGFIKRQLVETRQITKHVAQILDSRMNTKYDENDKLIREVKVITLKSKLVSDFRKDFQFYKVREINNYHHAHDAYLNAVVGTALIKKYPKLESEFVYGDYKVYDVRKMITAHAEIMALRQGGLVMQNYRLIDATLYVTFEPCVMCAGAMIHSRIGRVVFGVRNAKTGAAGSLMDVLHYPGMNHRVEITEGILADECAALLCYFFRMPRQVFNAQKKAQSSTDGSSGSETPGTSESATPESSGSEVEFSHEYWMRHALTLAKRARDEREVPVGAVLVLNNRVIGEGWNRAIGLHDPAKSEQEIGKATAKYFFYSNIMNFFKTEITLANGEIRKRPLIETNGETGEIVWDKGRDFATVRKVLSMPQVNIVKKTEVQTGGFSKESILPKRNSDKLIARKKDWDPKKYGGFDSPTVAYSVLVVAKVEKGKSKKLKSVKELLGITIMERSSFEKNPIDFLEAKGYKEVKKDLIIKLPKYSLFELENGRKRMLASAGELQKGNELALPSKYVNFLYLASHYEKLKGSPEDNEQKQLFVEQHKHYLDEIIEQISEFSKRVILADANLDKVLSAYNKHRDKPIREQAENIIHLFTLTNLGAPAAFKYFDTTIDRKRYTSTKEVLDATLIHQSITGLYETRIDLSQLGGD

SEQ ID NO: 305 - protein, 1554 aa, synthetic construct
  REGION 1..1554: note = 129 TadA CP65ins 1029 polypeptide sequence
MDKKYSIGLAIGTNSVGWAVITDEYKVPSKKFKVLGNTDRHSIKKNLIGALLFDSGETAEATRLKRTARRRYTRRKNRICYLQEIFSNEMAKVDDSFFHRLEESFLVEEDKKHERHPIFGNIVDEVAYHEKYPTIYHLRKKLVDSTDKADLRLIYLALAHMIKFRGHFLIEGDLNPDNSDVDKLFIQLVQTYNQLFEENPINASGVDAKAILSARLSKSRRLENLIAQLPGEKKNGLFGNLIALSLGLTPNFKSNFDLAEDAKLQLSKDTYDDDLDNLLAQIGDQYADLFLAAKNLSDAILLSDILRVNTEITKAPLSASMIKRYDEHHQDLTLLKALVRQQLPEKYKEIFFDQSKNGYAGYIDGGASQEEFYKFIKPILEKMDGTEELLVKLNREDLLRKQRTFDNGSIPHQIHLGELHAILRRQEDFYPFLKDNREKIEKILTFRIPYYVGPLARGNSRFAWMTRKSEETITPWNFEEVVDKGASAQSFIERMTNFDKNLPNEKVLPKHSLLYEYFTVYNELTKVKYVTEGMRKPAFLSGEQKKAIVDLLFKTNRKVTVKQLKEDYFKKIECFDSVEISGVEDRFNASLGTYHDLLKIIKDKDFLDNEENEDILEDIVLTLTLFEDREMIEERLKTYAHLFDDKVMKQLKRRRYTGWGRLSRKLINGIRDKQSGKTILDFLKSDGFANRNFMQLIHDDSLTFKEDIQKAQVSGQGDSLHEHIANLAGSPAIKKGILQTVKVVDELVKVMGRHKPENIVIEMARENQTTQKGQKNSRERMKRIEEGIKELGSQILKEHPVENTQLQNEKLYLYYLQNGRDMYVDQELDINRLSDYDVDHIVPQSFLKDDSIDNKVLTRSDKNRGKSDNVPSEEVVKKMKNYWRQLLNAKLITQRKFDNLTKAERGGLSELDKAGFIKRQLVETRQITKHVAQILDSRMNTKYDENDKLIREVKVITLKSKLVSDFRKDFQFYKVREINNYHHAHDAYLNAVVGTALIKKYPKLESEFVYGDYKVYDVRKMIAKSEQEITAHAEIMALRQGGLVMQNYRLIDATLYVTFEPCVMCAGAMIHSRIGRVVFGVRNAKTGAAGSLMDVLHYPGMNHRVEITEGILADECAALLCYFFRMPRQVFNAQKKAQSSTDGSSGSETPGTSESATPESSGSEVEFSHEYWMRHALTLAKRARDEREVPVGAVLVLNNRVIGEGWNRAIGLHDPGKATAKYFFYSNIMNFFKTEITLANGEIRKRPLIETNGETGEIVWDKGRDFATVRKVLSMPQVNIVKKTEVQTGGFSKESILPKRNSDKLIARKKDWDPKKYGGFDSPTVAYSVLVVAKVEKGKSKKLKSVKELLGITIMERSSFEKNPIDFLEAKGYKEVKKDLIIKLPKYSLFELENGRKRMLASAGELQKGNELALPSKYVNFLYLASHYEKLKGSPEDNEQKQLFVEQHKHYLDEIIEQISEFSKRVILADANLDKVLSAYNKHRDKPIREQAENIIHLFTLTNLGAPAAFKYFDTTIDRKRYTSTKEVLDATLIHQSITGLYETRIDLSQLGGD

SEQ ID NO: 306 - protein, 1554 aa, synthetic construct
  REGION 1..1554: note = 130 TadA CP65ins 1041 polypeptide sequence
MDKKYSIGLAIGTNSVGWAVITDEYKVPSKKFKVLGNTDRHSIKKNLIGALLFDSGETAEATRLKRTARRRYTRRKNRICYLQEIFSNEMAKVDDSFFHRLEESFLVEEDKKHERHPIFGNIVDEVAYHEKYPTIYHLRKKLVDSTDKADLRLIYLALAHMIKFRGHFLIEGDLNPDNSDVDKLFIQLVQTYNQLFEENPINASGVDAKAILSARLSKSRRLENLIAQLPGEKKNGLFGNLIALSLGLTPNFKSNFDLAEDAKLQLSKDTYDDDLDNLLAQIGDQYADLFLAAKNLSDAILLSDILRVNTEITKAPLSASMIKRYDEHHQDLTLLKALVRQQLPEKYKEIFFDQSKNGYAGYIDGGASQEEFYKFIKPILEKMDGTEELLVKLNREDLLRKQRTFDNGSIPHQIHLGELHAILRRQEDFYPFLKDNREKIEKILTFRIPYYVGPLARGNSRFAWMTRKSEETITPWNFEEVVDKGASAQSFIERMTNFDKNLPNEKVLPKHSLLYEYFTVYNELTKVKYVTEGMRKPAFLSGEQKKAIVDLLFKTNRKVTVKQLKEDYFKKIECFDSVEISGVEDRFNASLGTYHDLLKIIKDKDFLDNEENEDILEDIVLTLTLFEDREMIEERLKTYAHLFDDKVMKQLKRRRYTGWGRLSRKLINGIRDKQSGKTILDFLKSDGFANRNFMQLIHDDSLTFKEDIQKAQVSGQGDSLHEHIANLAGSPAIKKGILQTVKVVDELVKVMGRHKPENIVIEMARENQTTQKGQKNSRERMKRIEEGIKELGSQILKEHPVENTQLQNEKLYLYYLQNGRDMYVDQELDINRLSDYDVDHIVPQSFLKDDSIDNKVLTRSDKNRGKSDNVPSEEVVKKMKNYWRQLLNAKLITQRKFDNLTKAERGGLSELDKAGFIKRQLVETRQITKHVAQILDSRMNTKYDENDKLIREVKVITLKSKLVSDFRKDFQFYKVREINNYHHAHDAYLNAVVGTALIKKYPKLESEFVYGDYKVYDVRKMIAKSEQEIGKATAKYFFYSTAHAEIMALRQGGLVMQNYRLIDATLYVTFEPCVMCAGAMIHSRIGRVVFGVRNAKTGAAGSLMDVLHYPGMNHRVEITEGILADECAALLCYFFRMPRQVFNAQKKAQSSTDGSSGSETPGTSESATPESSGSEVEFSHEYWMRHALTLAKRARDEREVPVGAVLVLNNRVIGEGWNRAIGLHDPNIMNFFKTEITLANGEIRKRPLIETNGETGEIVWDKGRDFATVRKVLSMPQVNIVKKTEVQTGGFSKESILPKRNSDKLIARKKDWDPKKYGGFDSPTVAYSVLVVAKVEKGKSKKLKSVKELLGITIMERSSFEKNPIDFLEAKGYKEVKKDLIIKLPKYSLFELENGRKRMLASAGELQKGNELALPSKYVNFLYLASHYEKLKGSPEDNEQKQLFVEQHKHYLDEIIEQISEFSKRVILADANLDKVLSAYNKHRDKPIREQAENIIHLFTLTNLGAPAAFKYFDTTIDRKRYTSTKEVLDATLIHQSITGLYETRIDLSQLGGD

SEQ ID NO: 307 - protein, 1554 aa, synthetic construct
  REGION 1..1554: note = 131 TadA CP65ins 1054 polypeptide sequence
MDKKYSIGLAIGTNSVGWAVITDEYKVPSKKFKVLGNTDRHSIKKNLIGALLFDSGETAEATRLKRTARRRYTRRKNRICYLQEIFSNEMAKVDDSFFHRLEESFLVEEDKKHERHPIFGNIVDEVAYHEKYPTIYHLRKKLVDSTDKADLRLIYLALAHMIKFRGHFLIEGDLNPDNSDVDKLFIQLVQTYNQLFEENPINASGVDAKAILSARLSKSRRLENLIAQLPGEKKNGLFGNLIALSLGLTPNFKSNFDLAEDAKLQLSKDTYDDDLDNLLAQIGDQYADLFLAAKNLSDAILLSDILRVNTEITKAPLSASMIKRYDEHHQDLTLLKALVRQQLPEKYKEIFFDQSKNGYAGYIDGGASQEEFYKFIKPILEKMDGTEELLVKLNREDLLRKQRTFDNGSIPHQIHLGELHAILRRQEDFYPFLKDNREKIEKILTFRIPYYVGPLARGNSRFAWMTRKSEETITPWNFEEVVDKGASAQSFIERMTNFDKNLPNEKVLPKHSLLYEYFTVYNELTKVKYVTEGMRKPAFLSGEQKKAIVDLLFKTNRKVTVKQLKEDYFKKIECFDSVEISGVEDRFNASLGTYHDLLKIIKDKDFLDNEENEDILEDIVLTLTLFEDREMIEERLKTYAHLFDDKVMKQLKRRRYTGWGRLSRKLINGIRDKQSGKTILDFLKSDGFANRNFMQLIHDDSLTFKEDIQKAQVSGQGDSLHEHIANLAGSPAIKKGILQTVKVVDELVKVMGRHKPENIVIEMARENQTTQKGQKNSRERMKRIEEGIKELGSQILKEHPVENTQLQNEKLYLYYLQNGRDMYVDQELDINRLSDYDVDHIVPQSFLKDDSIDNKVLTRSDKNRGKSDNVPSEEVVKKMKNYWRQLLNAKLITQRKFDNLTKAERGGLSELDKAGFIKRQLVETRQITKHVAQILDSRMNTKYDENDKLIREVKVITLKSKLVSDFRKDFQFYKVREINNYHHAHDAYLNAVVGTALIKKYPKLESEFVYGDYKVYDVRKMIAKSEQEIGKATAKYFFYSNIMNFFKTEITLANTAHAEIMALRQGGLVMQNYRLIDATLYVTFEPCVMCAGAMIHSRIGRVVFGVRNAKTGAAGSLMDVLHYPGMNHRVEITEGILADECAALLCYFFRMPRQVFNAQKKAQSSTDGSSGSETPGTSESATPESSGSEVEFSHEYWMRHALTLAKRARDEREVPVGAVLVLNNRVIGEGWNRAIGLHDPGEIRKRPLIETNGETGEIVWDKGRDFATVRKVLSMPQVNIVKKTEVQTGGFSKESILPKRNSDKLIARKKDWDPKKYGGFDSPTVAYSVLVVAKVEKGKSKKLKSVKELLGITIMERSSFEKNPIDFLEAKGYKEVKKDLIIKLPKYSLFELENGRKRMLASAGELQKGNELALPSKYVNFLYLASHYEKLKGSPEDNEQKQLFVEQHKHYLDEIIEQISEFSKRVILADANLDKVLSAYNKHRDKPIREQAENIIHLFTLTNLGAPAAFKYFDTTIDRKRYTSTKEVLDATLIHQSITGLYETRIDLSQLGGD

SEQ ID NO: 308 - protein, 1554 aa, synthetic construct
  REGION 1..1554: note = 132 TadA CP65ins 1246 polypeptide sequence
MDKKYSIGLAIGTNSVGWAVITDEYKVPSKKFKVLGNTDRHSIKKNLIGALLFDSGETAEATRLKRTARRRYTRRKNRICYLQEIFSNEMAKVDDSFFHRLEESFLVEEDKKHERHPIFGNIVDEVAYHEKYPTIYHLRKKLVDSTDKADLRLIYLALAHMIKFRGHFLIEGDLNPDNSDVDKLFIQLVQTYNQLFEENPINASGVDAKAILSARLSKSRRLENLIAQLPGEKKNGLFGNLIALSLGLTPNFKSNFDLAEDAKLQLSKDTYDDDLDNLLAQIGDQYADLFLAAKNLSDAILLSDILRVNTEITKAPLSASMIKRYDEHHQDLTLLKALVRQQLPEKYKEIFFDQSKNGYAGYIDGGASQEEFYKFIKPILEKMDGTEELLVKLNREDLLRKQRTFDNGSIPHQIHLGELHAILRRQEDFYPFLKDNREKIEKILTFRIPYYVGPLARGNSRFAWMTRKSEETITPWNFEEVVDKGASAQSFIERMTNFDKNLPNEKVLPKHSLLYEYFTVYNELTKVKYVTEGMRKPAFLSGEQKKAIVDLLFKTNRKVTVKQLKEDYFKKIECFDSVEISGVEDRFNASLGTYHDLLKIIKDKDFLDNEENEDILEDIVLTLTLFEDREMIEERLKTYAHLFDDKVMKQLKRRRYTGWGRLSRKLINGIRDKQSGKTILDFLKSDGFANRNFMQLIHDDSLTFKEDIQKAQVSGQGDSLHEHIANLAGSPAIKKGILQTVKVVDELVKVMGRHKPENIVIEMARENQTTQKGQKNSRERMKRIEEGIKELGSQILKEHPVENTQLQNEKLYLYYLQNGRDMYVDQELDINRLSDYDVDHIVPQSFLKDDSIDNKVLTRSDKNRGKSDNVPSEEVVKKMKNYWRQLLNAKLITQRKFDNLTKAERGGLSELDKAGFIKRQLVETRQITKHVAQILDSRMNTKYDENDKLIREVKVITLKSKLVSDFRKDFQFYKVREINNYHHAHDAYLNAVVGTALIKKYPKLESEFVYGDYKVYDVRKMIAKSEQEIGKATAKYFFYSNIMNFFKTEITLANGEIRKRPLIETNGETGEIVWDKGRDFATVRKVLSMPQVNIVKKTEVQTGGFSKESILPKRNSDKLIARKKDWDPKKYGGFDSPTVAYSVLVVAKVEKGKSKKLKSVKELLGITIMERSSFEKNPIDFLEAKGYKEVKKDLIIKLPKYSLFELENGRKRMLASAGELQKGNELALPSKYVNFLYLASHYEKLKGTAHAEIMALRQGGLVMQNYRLIDATLYVTFEPCVMCAGAMIHSRIGRVVFGVRNAKTGAAGSLMDVLHYPGMNHRVEITEGILADECAALLCYFFRMPRQVFNAQKKAQSSTDGSSGSETPGTSESATPESSGSEVEFSHEYWMRHALTLAKRARDEREVPVGAVLVLNNRVIGEGWNRAIGLHDPSPEDNEQKQLFVEQHKHYLDEIIEQISEFSKRVILADANLDKVLSAYNKHRDKPIREQAENIIHLFTLTNLGAPAAFKYFDTTIDRKRYTSTKEVLDATLIHQSITGLYETRIDLSQLGGD

SEQ ID NO: 309 - protein, 160 aa, Staphylococcus aureus
  REGION 1..160: note = MISC_FEATURE - TadA polypeptide sequence
MGSHMTNDIYFMTLAIEEAKKAAQLGEVPIGAIITKDDEVIARAHNLRETLQQPTAHAEHIAIERAAKVLGSWRLEGCTLYVTLEPCVMCAGTIVMSRIPRVVYGADDPKGGCSGSLMNLLQQSNFNHRAIVDKGVLKEACSTLLTTFFKNLRANKKSTN

SEQ ID NO: 310 - protein, 161 aa, Bacillus subtilis
  REGION 1..161: note = MISC_FEATURE - TadA polypeptide sequence
MTQDELYMKEAIKEAKKAEEKGEVPIGAVLVINGEIIARAHNLRETEQRSIAHAEMLVIDEACKALGTWRLEGATLYVTLEPCPMCAGAVVLSRVEKVVFGAFDPKGGCSGTLMNLLQEERFNHQAEVVSGVLEEECGGMLSAFFRELRKKKKAARKNLSE

SEQ ID NO: 311 - protein, 183 aa, Salmonella enterica
  REGION 1..183: note = MISC_FEATURE - TadA polypeptide sequence
  source 1..183: note = serovar Typhimurium
MPPAFITGVTSLSDVELDHEYWMRHALTLAKRAWDEREVPVGAVLVHNHRVIGEGWNRPIGRHDPTAHAEIMALRQGGLVLQNYRLLDTTLYVTLEPCVMCAGAMVHSRIGRVVFGARDAKTGAAGSLIDVLHHPGMNHRVEIIEGVLRDECATLLSDFFRMRRQEIKALKKADRAEGAGPAV

SEQ ID NO: 312 - protein, 164 aa, Shewanella putrefaciens
  REGION 1..164: note = MISC_FEATURE - TadA polypeptide sequence
MDEYWMQVAMQMAEKAEAAGEVPVGAVLVKDGQQIATGYNLSISQHDPTAHAEILCLRSAGKKLENYRLLDATLYITLEPCAMCAGAMVHSRIARVVYGARDEKTGAAGTVVNLLQHPAFNHQVEVTSGVLAEACSAQLSRFFKRRRDEKKALKLAQRAQQGIE

SEQ ID NO: 313 - protein, 173 aa, Haemophilus influenzae
  REGION 1..173: note = MISC_FEATURE - TadA polypeptide sequence
MDAAKVRSEFDEKMMRYALELADKAEALGEIPVGAVLVDDARNIIGEGWNLSIVQSDPTAHAEIIALRNGAKNIQNYRLLNSTLYVTLEPCTMCAGAILHSRIKRLVFGASDYKTGAIGSRFHFFDDYKMNHTLEITSGVLAEECSQKLSTFFQKRREEKKIEKALLKSLSDK

SEQ ID NO: 314 - protein, 161 aa, Caulobacter crescentus
  REGION 1..161: note = MISC_FEATURE - TadA polypeptide sequence
MRTDESEDQDHRMMRLALDAARAAAEAGETPVGAVILDPSTGEVIATAGNGPIAAHDPTAHAEIAAMRAAAAKLGNYRLTDLTLVVTLEPCAMCAGAISHARIGRVVFGADDPKGGAVVHGPKFFAQPTCHWRPEVTGGVLADESADLLRGFFRARRKAKI

SEQ ID NO: 315 - protein, 179 aa, Geobacter sulfurreducens
  REGION 1..179: note = MISC_FEATURE - TadA polypeptide sequence
MSSLKKTPIRDDAYWMGKAIREAAKAAARDEVPIGAVIVRDGAVIGRGHNLREGSNDPSAHAEMIAIRQAARRSANWRLTGATLYVTLEPCLMCMGAIILARLERVVFGCYDPKGGAAGSLYDLSADPRLNHQVRLSPGVCQEECGTMLSDFFRDLRRRKKAKATPALFIDERKVPPEP

SEQ ID NO: 316 - protein, 167 aa, synthetic construct
  REGION 1..167: note = TadA*8 polypeptide sequence
MSEVEFSHEYWMRHALTLAKRARDEREVPVGAVLVLNNRVIGEGWNRAIGLHDPTAHAEIMALRQGGLVMQNYRLIDATLYVTFEPCVMCAGAMIHSRIGRVVFGVRNAKTGAAGSLMDVLHYPGMNHRVEITEGILADECAALLCTFFRMPRQVFNAQKKAQSSTD

SEQ ID NO: 317 - RNA, 80 nt, synthetic construct
  misc_feature 1..80: note = gRNA scaffold polynucleotide sequence
  source 1..80: mol_type = other RNA
gttttagagctagaaatagcaagttaaaataaggctagtccgttatcaacttgaaaaagtggcaccgagtcggtgctttt

SEQ ID NO: 318 - RNA, 125 nt, synthetic construct
  misc_feature 1..125: note = gRNA scaffold polynucleotide sequence
  source 1..125: mol_type = other RNA
gtttttgtactctcaagatttaagtaactgtacaacgaaacttacacagttacttaaatcttgcagaagctacaaagataaggcttcatgccgaaatcaacaccctgtcattttatggcagggtg

SEQ ID NO: 319 - RNA, 76 nt, Streptococcus pyogenes
  misc_feature 1..76: note = S. pyogenes gRNA scaffold oligonucleotide sequence
  source 1..76: mol_type = other RNA
gttttagagctagaaatagcaagttaaaataaggctagtccgttatcaacttgaaaaagtggcaccgagtcggtgc

SEQ ID NO: 320 - RNA, 84 nt, Staphylococcus aureus
  misc_feature 1..84: note = S. aureus gRNA scaffold oligonucleotide sequence
  source 1..84: mol_type = other RNA
gttttagtactctgtaatgaaaattacagaatctactaaaacaaggcaaaatgccgtgtttatctcgtcaacttgttggcgaga

SEQ ID NO: 321 - RNA, 97 nt, Bacillus hisashii
  misc_feature 1..97: note = BhCas12b gRNA scaffold oligonucleotide sequence
  source 1..97: mol_type = other RNA
gttctgtcttttggtcaggacaaccgtctagctataagtgctgcagggtgtgagaaactcctattgctggacgatgtctcttacgaggcattagcac

SEQ ID NO: 322 - RNA, 88 nt, Bacillus sp.
  misc_feature 1..88: note = BvCas12b gRNA scaffold oligonucleotide sequence
  source 1..88: mol_type = other RNA
gacctatagggtcaatgaatctgtgcgtgtgccataagtaattaaaaattacccaccacaggagcacctgaaaacaggtgcttggcac

SEQ ID NO: 323 - RNA, 80 nt, synthetic construct
  misc_feature 1..80: note = gRNA scaffold nucleotide sequence; oligonucleotide sequence
  modified_base 78..80: mod_base = um
  misc_feature 78..80: note = In embodiments, a nucleotide(s) is linked to the preceding 5' nucleotide by a 3' phosphorothioate internucleotide linkage
  source 1..80: mol_type = other RNA
gttttagagctagaaatagcaagttaaaataaggctagtccgttatcaacttgaaaaagtgggaccgagtcggtgctttt

SEQ ID NO: 324 - RNA, 80 nt, synthetic construct; identical to SEQ ID NO: 317
  misc_feature 1..80: note = gRNA scaffold nucleotide sequence
  misc_feature 78..80: note = In embodiments, a nucleotide(s) is linked to the preceding 5' nucleotide by a 3' phosphorothioate internucleotide linkage
  modified_base 78..80: mod_base = um
  source 1..80: mol_type = other RNA

SEQ ID NO: 325 - RNA, 117 nt, Bacillus hisashii
  misc_feature 1..117: note = BhCas12b gRNA scaffold + guide sequence; oligonucleotide sequence
  misc_feature 1..97: note = BhCas12b sgRNA scaffold
  source 1..117: mol_type = other RNA
gttctgtcttttggtcaggacaaccgtctagctataagtgctgcagggtgtgagaaactcctattgctggacgatgtctcttacgaggcattagcacnnnnnnnnnnnnnnnnnnnn

SEQ ID NO: 326 - RNA, 108 nt, Bacillus sp.
  misc_feature 1..108: note = BvCas12b gRNA scaffold + guide sequence; oligonucleotide sequence
  misc_feature 1..88: note = BvCas12b gRNA scaffold
  source 1..108: mol_type = other RNA
gacctatagggtcaatgaatctgtgcgtgtgccataagtaattaaaaattacccaccacaggagcacctgaaaacaggtgcttggcacnnnnnnnnnnnnnnnnnnnn

SEQ ID NO: 327 - RNA, 119 nt, Alicyclobacillus acidiphilus
  misc_feature 1..119: note = AaCas12b gRNA scaffold + guide sequence; oligonucleotide sequence
  misc_feature 1..99: note = AaCas12b gRNA scaffold
  source 1..119: mol_type = other RNA
gtctaaaggacagaatttttcaacgggtgtgccaatggccactttccaggtggcaaagcccgttgaacttctcaaaaagaacgatctgagaagtggcacnnnnnnnnnnnnnnnnnnnn

SEQ ID NO: 328 - protein, 29 aa, synthetic construct
  REGION 1..29: note = synthetic polypeptide sequence
PKKKRKVEGADKRTADGSEFESPKKKRKV

SEQ ID NO: 329 - protein, 23 aa, synthetic construct
  REGION 1..23: note = synthetic peptide sequence
RKSGKIAAIVVKRPRKPKKKRKV

SEQ ID NO: 330 - protein, 8 aa, synthetic construct
  REGION 1..8: note = synthetic peptide sequence
SGGSSGGS

SEQ ID NO: 331 - protein, 1609 aa, synthetic construct
  REGION 1..1609: note = pNMG-B335ABE8.1_Y147T_CP5_NGC PAM_monomer polypeptide sequence
MSEVEFSHEYWMRHALTLAKRARDEREVPVGAVLVLNNRVIGEGWNRAIGLHDPTAHAEIMALRQGGLVMQNYRLIDATLYVTFEPCVMCAGAMIHSRIGRVVFGVRNAKTGAAGSLMDVLHYPGMNHRVEITEGILADECAALLCTFFRMPRQVFNAQKKAQSSTDSGGSSGGSSGSETPGTSESATPESSGGSSGGSEIGKATAKYFFYSNIMNFFKTEITLANGEIRKRPLIETNGETGEIVWDKGRDFATVRKVLSMPQVNIVKKTEVQTGGFSKESILPKRNSDKLIARKKDWDPKKYGGFMQPTVAYSVLVVAKVEKGKSKKLKSVKELLGITIMERSSFEKNPIDFLEAKGYKEVKKDLIIKLPKYSLFELENGRKRMLASAKFLQKGNELALPSKYVNFLYLASHYEKLKGSPEDNEQKQLFVEQHKHYLDEIIEQISEFSKRVILADANLDKVLSAYNKHRDKPIREQAENIIHLFTLTNLGAPRAFKYFDTTIARKEYRSTKEVLDATLIHQSITGLYETRIDLSQLGGDGGSGGSGGSGGSGGSGGSGGMDKKYSIGLAIGTNSVGWAVITDEYKVPSKKFKVLGNTDRHSIKKNLIGALLFDSGETAEATRLKRTARRRYTRRKNRICYLQEIFSNEMAKVDDSFFHRLEESFLVEEDKKHERHPIFGNIVDEVAYHEKYPTIYHLRKKLVDSTDKADLRLIYLALAHMIKFRGHFLIEGDLNPDNSDVDKLFIQLVQTYNQLFEENPINASGVDAKAILSARLSKSRRLENLIAQLPGEKKNGLFGNLIALSLGLTPNFKSNFDLAEDAKLQLSKDTYDDDLDNLLAQIGDQYADLFLAAKNLSDAILLSDILRVNTEITKAPLSASMIKRYDEHHQDLTLLKALVRQQLPEKYKEIFFDQSKNGYAGYIDGGASQEEFYKFIKPILEKMDGTEELLVKLNREDLLRKQRTFDNGSIPHQIHLGELHAILRRQEDFYPFLKDNREKIEKILTFRIPYYVGPLARGNSRFAWMTRKSEETITPWNFEEVVDKGASAQSFIERMTNFDKNLPNEKVLPKHSLLYEYFTVYNELTKVKYVTEGMRKPAFLSGEQKKAIVDLLFKTNRKVTVKQLKEDYFKKIECFDSVEISGVEDRFNASLGTYHDLLKIIKDKDFLDNEENEDILEDIVLTLTLFEDREMIEERLKTYAHLFDDKVMKQLKRRRYTGWGRLSRKLINGIRDKQSGKTILDFLKSDGFANRNFMQLIHDDSLTFKEDIQKAQVSGQGDSLHEHIANLAGSPAIKKGILQTVKVVDELVKVMGRHKPENIVIEMARENQTTQKGQKNSRERMKRIEEGIKELGSQILKEHPVENTQLQNEKLYLYYLQNGRDMYVDQELDINRLSDYDVDHIVPQSFLKDDSIDNKVLTRSDKNRGKSDNVPSEEVVKKMKNYWRQLLNAKLITQRKFDNLTKAERGGLSELDKAGFIKRQLVETRQITKHVAQILDSRMNTKYDENDKLIREVKVITLKSKLVSDFRKDFQFYKVREINNYHHAHDAYLNAVVGTALIKKYPKLESEFVYGDYKVYDVRKMIAKSEQEGADKRTADGSEFESPKKKRKV

SEQ ID NO: 332 - protein, 1807 aa, synthetic construct
  REGION 1..1807: note = pNMG-357_ABE8.14 with NGC PAMCP5 polypeptide sequence
  REGION 1..174: note = MISC_FEATURE - Adenosine deaminase sequence
  REGION 175..198: note = MISC_FEATURE - Linker sequence
  REGION 199..365: note = MISC_FEATURE - Adenosine deaminase sequence
  REGION 366..397: note = MISC_FEATURE - Linker sequence
  REGION 398..738: note = MISC_FEATURE - Sequence derived from Cas9
  REGION 739..759: note = MISC_FEATURE - Linker sequence
  REGION 760..1785: note = MISC_FEATURE - Sequence derived from Cas9
  REGION 1786..1807: note = MISC_FEATURE - Bipartite nuclear localization sequence
MSEVEFSHEYWMRHALTLAKRAWDEREVPVGAVLVHNNRVIGEGWNRPIGRHDPTAHAEIMALRQGGLVMQNYRLIDATLYVTLEPCVMCAGAMIHSRIGRVVFGARDAKTGAAGSLMDVLHHPGMNHRVEITEGILADECAALLSDFFRMRRQEIKAQKKAQSSTDGGSSGGSSGSETPGTSESATPESSGGSSGGSMSEVEFSHEYWMRHALTLAKRARDEREVPVGAVLVLNNRVIGEGWNRAIGLHDPTAHAEIMALRQGGLVMQNYRLIDATLYVTFEPCVMCAGAMIHSRIGRVVFGVRNAKTGAAGSLMDVLHYPGMNHRVEITEGILADECAALLCTFFRMPRQVFNAQKKAQSSTDSGGSSGGSSGSETPGTSESATPESSGGSSGGSEIGKATAKYFFYSNIMNFFKTEITLANGEIRKRPLIETNGETGEIVWDKGRDFATVRKVLSMPQVNIVKKTEVQTGGFSKESILPKRNSDKLIARKKDWDPKKYGGFMQPTVAYSVLVVAKVEKGKSKKLKSVKELLGITIMERSSFEKNPIDFLEAKGYKEVKKDLIIKLPKYSLFELENGRKRMLASAKFLQKGNELALPSKYVNFLYLASHYEKLKGSPEDNEQKQLFVEQHKHYLDEIIEQISEFSKRVILADANLDKVLSAYNKHRDKPIREQAENIIHLFTLTNLGAPRAFKYFDTTIARKEYRSTKEVLDATLIHQSITGLYETRIDLSQLGGDGGSGGSGGSGGSGGSGGSGGMDKKYSIGLAIGTNSVGWAVITDEYKVPSKKFKVLGNTDRHSIKKNLIGALLFDSGETAEATRLKRTARRRYTRRKNRICYLQEIFSNEMAKVDDSFFHRLEESFLVEEDKKHERHPIFGNIVDEVAYHEKYPTIYHLRKKLVDSTDKADLRLIYLALAHMIKFRGHFLIEGDLNPDNSDVDKLFIQLVQTYNQLFEENPINASGVDAKAILSARLSKSRRLENLIAQLPGEKKNGLFGNLIALSLGLTPNFKSNFDLAEDAKLQLSKDTYDDDLDNLLAQIGDQYADLFLAAKNLSDAILLSDILRVNTEITKAPLSASMIKRYDEHHQDLTLLKALVRQQLPEKYKEIFFDQSKNGYAGYIDGGASQEEFYKFIKPILEKMDGTEELLVKLNREDLLRKQRTFDNGSIPHQIHLGELHAILRRQEDFYPFLKDNREKIEKILTFRIPYYVGPLARGNSRFAWMTRKSEETITPWNFEEVVDKGASAQSFIERMTNFDKNLPNEKVLPKHSLLYEYFTVYNELTKVKYVTEGMRKPAFLSGEQKKAIVDLLFKTNRKVTVKQLKEDYFKKIECFDSVEISGVEDRFNASLGTYHDLLKIIKDKDFLDNEENEDILEDIVLTLTLFEDREMIEERLKTYAHLFDDKVMKQLKRRRYTGWGRLSRKLINGIRDKQSGKTILDFLKSDGFANRNFMQLIHDDSLTFKEDIQKAQVSGQGDSLHEHIANLAGSPAIKKGILQTVKVVDELVKVMGRHKPENIVIEMARENQTTQKGQKNSRERMKRIEEGIKELGSQILKEHPVENTQLQNEKLYLYYLQNGRDMYVDQELDINRLSDYDVDHIVPQSFLKDDSIDNKVLTRSDKNRGKSDNVPSEEVVKKMKNYWRQLLNAKLITQRKFDNLTKAERGGLSELDKAGFIKRQLVETRQITKHVAQILDSRMNTKYDENDKLIREVKVITLKSKLVSDFRKDFQFYKVREINNYHHAHDAYLNAVVGTALIKKYPKLESEFVYGDYKVYDVRKMIAKSEQEGADKRTADGSEFESPKKKRKV

SEQ ID NO: 333 - protein, 1588 aa, synthetic construct
  REGION 1..1588: note = ABE8.8-m polypeptide sequence
  REGION 1..167: note = MISC_FEATURE - Adenosine deaminase sequence
  REGION 168..199: note = MISC_FEATURE - Linker sequence
  REGION 200..1566: note = MISC_FEATURE - Sequence derived from Cas9
  REGION 1567..1588: note = MISC_FEATURE - Bipartite nuclear localization sequence
MSEVEFSHEYWMRHALTLAKRARDEREVPVGAVLVLNNRVIGEGWNRAIGLHDPTAHAEIMALRQGGLVMQNYRLIDATLYVTFEPCVMCAGAMIHSRIGRVVFGVRNAKTGAAGSLMDVLHHPGMNHRVEITEGILADECAALLCRFFRMPRRVFNAQKKAQSSTDSGGSSGGSSGSETPGTSESATPESSGGSSGGSDKKYSIGLAIGTNSVGWAVITDEYKVPSKKFKVLGNTDRHSIKKNLIGALLFDSGETAEATRLKRTARRRYTRRKNRICYLQEIFSNEMAKVDDSFFHRLEESFLVEEDKKHERHPIFGNIVDEVAYHEKYPTIYHLRKKLVDSTDKADLRLIYLALAHMIKFRGHFLIEGDLNPDNSDVDKLFIQLVQTYNQLFEENPINASGVDAKAILSARLSKSRRLENLIAQLPGEKKNGLFGNLIALSLGLTPNFKSNFDLAEDAKLQLSKDTYDDDLDNLLAQIGDQYADLFLAAKNLSDAILLSDILRVNTEITKAPLSASMIKRYDEHHQDLTLLKALVRQQLPEKYKEIFFDQSKNGYAGYIDGGASQEEFYKFIKPILEKMDGTEELLVKLNREDLLRKQRTFDNGSIPHQIHLGELHAILRRQEDFYPFLKDNREKIEKILTFRIPYYVGPLARGNSRFAWMTRKSEETITPWNFEEVVDKGASAQSFIERMTNFDKNLPNEKVLPKHSLLYEYFTVYNELTKVKYVTEGMRKPAFLSGEQKKAIVDLLFKTNRKVTVKQLKEDYFKKIECFDSVEISGVEDRFNASLGTYHDLLKIIKDKDFLDNEENEDILEDIVLTLTLFEDREMIEERLKTYAHLFDDKVMKQLKRRRYTGWGRLSRKLINGIRDKQSGKTILDFLKSDGFANRNFMQLIHDDSLTFKEDIQKAQVSGQGDSLHEHIANLAGSPAIKKGILQTVKVVDELVKVMGRHKPENIVIEMARENQTTQKGQKNSRERMKRIEEGIKELGSQILKEHPVENTQLQNEKLYLYYLQNGRDMYVDQELDINRLSDYDVDHIVPQSFLKDDSIDNKVLTRSDKNRGKSDNVPSEEVVKKMKNYWRQLLNAKLITQRKFDNLTKAERGGLSELDKAGFIKRQLVETRQITKHVAQILDSRMNTKYDENDKLIREVKVITLKSKLVSDFRKDFQFYKVREINNYHHAHDAYLNAVVGTALIKKYPKLESEFVYGDYKVYDVRKMIAKSEQEIGKATAKYFFYSNIMNFFKTEITLANGEIRKRPLIETNGETGEIVWDKGRDFATVRKVLSMPQVNIVKKTEVQTGGFSKESILPKRNSDKLIARKKDWDPKKYGGFDSPTVAYSVLVVAKVEKGKSKKLKSVKELLGITIMERSSFEKNPIDFLEAKGYKEVKKDLIIKLPKYSLFELENGRKRMLASAGELQKGNELALPSKYVNFLYLASHYEKLKGSPEDNEQKQLFVEQHKHYLDEIIEQISEFSKRVILADANLDKVLSAYNKHRDKPIREQAENIIHLFTLTNLGAPAAFKYFDTTIDRKRYTSTKEVLDATLIHQSITGLYETRIDLSQLGGDEGADKRTADGSEFESPKKKRKV

SEQ ID NO: 334 - protein, 1786 aa, synthetic construct
  REGION 1..1786: note = ABE8.8-d polypeptide sequence
  REGION 1..167: note = MISC_FEATURE - Adenosine deaminase sequence
  REGION 168..199: note = MISC_FEATURE - Linker sequence
  REGION 200..365: note = MISC_FEATURE - Adenosine deaminase sequence
  REGION 366..397: note = MISC_FEATURE - Linker sequence
  REGION 398..1764: note = MISC_FEATURE - Sequence derived from Cas9
  REGION 1765..1786: note = MISC_FEATURE - Bipartite nuclear localization sequence
MSEVEFSHEYWMRHALTLAKRAWDEREVPVGAVLVHNNRVIGEGWNRPIGRHDPTAHAEIMALRQGGLVMQNYRLIDATLYVTLEPCVMCAGAMIHSRIGRVVFGARDAKTGAAGSLMDVLHHPGMNHRVEITEGILADECAALLSDFFRMRRQEIKAQKKAQSSTDSGGSSGGSSGSETPGTSESATPESSGGSSGGSSEVEFSHEYWMRHALTLAKRARDEREVPVGAVLVLNNRVIGEGWNRAIGLHDPTAHAEIMALRQGGLVMQNYRLIDATLYVTFEPCVMCAGAMIHSRIGRVVFGVRNAKTGAAGSLMDVLHHPGMNHRVEITEGILADECAALLCRFFRMPRRVFNAQKKAQSSTDSGGSSGGSSGSETPGTSESATPESSGGSSGGSDKKYSIGLAIGTNSVGWAVITDEYKVPSKKFKVLGNTDRHSIKKNLIGALLFDSGETAEATRLKRTARRRYTRRKNRICYLQEIFSNEMAKVDDSFFHRLEESFLVEEDKKHERHPIFGNIVDEVAYHEKYPTIYHLRKKLVDSTDKADLRLIYLALAHMIKFRGHFLIEGDLNPDNSDVDKLFIQLVQTYNQLFEENPINASGVDAKAILSARLSKSRRLENLIAQLPGEKKNGLFGNLIALSLGLTPNFKSNFDLAEDAKLQLSKDTYDDDLDNLLAQIGDQYADLFLAAKNLSDAILLSDILRVNTEITKAPLSASMIKRYDEHHQDLTLLKALVRQQLPEKYKEIFFDQSKNGYAGYIDGGASQEEFYKFIKPILEKMDGTEELLVKLNREDLLRKQRTFDNGSIPHQIHLGELHAILRRQEDFYPFLKDNREKIEKILTFRIPYYVGPLARGNSRFAWMTRKSEETITPWNFEEVVDKGASAQSFIERMTNFDKNLPNEKVLPKHSLLYEYFTVYNELTKVKYVTEGMRKPAFLSGEQKKAIVDLLFKTNRKVTVKQLKEDYFKKIECFDSVEISGVEDRFNASLGTYHDLLKIIKDKDFLDNEENEDILEDIVLTLTLFEDREMIEERLKTYAHLFDDKVMKQLKRRRYTGWGRLSRKLINGIRDKQSGKTILDFLKSDGFANRNFMQLIHDDSLTFKEDIQKAQVSGQGDSLHEHIANLAGSPAIKKGILQTVKVVDELVKVMGRHKPENIVIEMARENQTTQKGQKNSRERMKRIEEGIKELGSQILKEHPVENTQLQNEKLYLYYLQNGRDMYVDQELDINRLSDYDVDHIVPQSFLKDDSIDNKVLTRSDKNRGKSDNVPSEEVVKKMKNYWRQLLNAKLITQRKFDNLTKAERGGLSELDKAGFIKRQLVETRQITKHVAQILDSRMNTKYDENDKLIREVKVITLKSKLVSDFRKDFQFYKVREINNYHHAHDAYLNAVVGTALIKKYPKLESEFVYGDYKVYDVRKMIAKSEQEIGKATAKYFFYSNIMNFFKTEITLANGEIRKRPLIETNGETGEIVWDKGRDFATVRKVLSMPQVNIVKKTEVQTGGFSKESILPKRNSDKLIARKKDWDPKKYGGFDSPTVAYSVLVVAKVEKGKSKKLKSVKELLGITIMERSSFEKNPIDFLEAKGYKEVKKDLIIKLPKYSLFELENGRKRMLASAGELQKGNELALPSKYVNFLYLASHYEKLKGSPEDNEQKQLFVEQHKHYLDEIIEQISEFSKRVILADANLDKVLSAYNKHRDKPIREQAENIIHLFTLTNLGAPAAFKYFDTTIDRKRYTSTKEVLDATLIHQSITGLYETRIDLSQLGGDEGADKRTADGSEFESPKKKRKV

SEQ ID NO: 335 - protein, 1588 aa, synthetic construct
  REGION 1..1588: note = ABE8.13-m polypeptide sequence
  REGION 1..167: note = MISC_FEATURE - Adenosine deaminase sequence
  REGION 168..199: note = MISC_FEATURE - Linker sequence
  REGION 200..1566: note = MISC_FEATURE - Sequence derived from Cas9
  REGION 1567..1588: note = MISC_FEATURE - Bipartite nuclear localization sequence
MSEVEFSHEYWMRHALTLAKRARDEREVPVGAVLVLNNRVIGEGWNRAIGLHDPTAHAEIMALRQGGLVMQNYRLYDATLYVTFEPCVMCAGAMIHSRIGRVVFGVRNAKTGAAGSLMDVLHHPGMNHRVEITEGILADECAALLCRFFRMPRRVFNAQKKAQSSTDSGGSSGGSSGSETPGTSESATPESSGGSSGGSDKKYSIGLAIGTNSVGWAVITDEYKVPSKKFKVLGNTDRHSIKKNLIGALLFDSGETAEATRLKRTARRRYTRRKNRICYLQEIFSNEMAKVDDSFFHRLEESFLVEEDKKHERHPIFGNIVDEVAYHEKYPTIYHLRKKLVDSTDKADLRLIYLALAHMIKFRGHFLIEGDLNPDNSDVDKLFIQLVQTYNQLFEENPINASGVDAKAILSARLSKSRRLENLIAQLPGEKKNGLFGNLIALSLGLTPNFKSNFDLAEDAKLQLSKDTYDDDLDNLLAQIGDQYADLFLAAKNLSDAILLSDILRVNTEITKAPLSASMIKRYDEHHQDLTLLKALVRQQLPEKYKEIFFDQSKNGYAGYIDGGASQEEFYKFIKPILEKMDGTEELLVKLNREDLLRKQRTFDNGSIPHQIHLGELHAILRRQEDFYPFLKDNREKIEKILTFRIPYYVGPLARGNSRFAWMTRKSEETITPWNFEEVVDKGASAQSFIERMTNFDKNLPNEKVLPKHSLLYEYFTVYNELTKVKYVTEGMRKPAFLSGEQKKAIVDLLFKTNRKVTVKQLKEDYFKKIECFDSVEISGVEDRFNASLGTYHDLLKIIKDKDFLDNEENEDILEDIVLTLTLFEDREMIEERLKTYAHLFDDKVMKQLKRRRYTGWGRLSRKLINGIRDKQSGKTILDFLKSDGFANRNFMQLIHDDSLTFKEDIQKAQVSGQGDSLHEHIANLAGSPAIKKGILQTVKVVDELVKVMGRHKPENIVIEMARENQTTQKGQKNSRERMKRIEEGIKELGSQILKEHPVENTQLQNEKLYLYYLQNGRDMYVDQELDINRLSDYDVDHIVPQSFLKDDSIDNKVLTRSDKNRGKSDNVPSEEVVKKMKNYWRQLLNAKLITQRKFDNLTKAERGGLSELDKAGFIKRQLVETRQITKHVAQILDSRMNTKYDENDKLIREVKVITLKSKLVSDFRKDFQFYKVREINNYHHAHDAYLNAVVGTALIKKYPKLESEFVYGDYKVYDVRKMIAKSEQEIGKATAKYFFYSNIMNFFKTEITLANGEIRKRPLIETNGETGEIVWDKGRDFATVRKVLSMPQVNIVKKTEVQTGGFSKESILPKRNSDKLIARKKDWDPKKYGGFDSPTVAYSVLVVAKVEKGKSKKLKSVKELLGITIMERSSFEKNPIDFLEAKGYKEVKKDLIIKLPKYSLFELENGRKRMLASAGELQKGNELALPSKYVNFLYLASHYEKLKGSPEDNEQKQLFVEQHKHYLDEIIEQISEFSKRVILADANLDKVLSAYNKHRDKPIREQAENIIHLFTLTNLGAPAAFKYFDTTIDRKRYTSTKEVLDATLIHQSITGLYETRIDLSQLGGDEGADKRTADGSEFESPKKKRKV

SEQ ID NO: 336 - protein, 1786 aa, synthetic construct
  REGION 1..1786: note = ABE8.13-d polypeptide sequence
  REGION 1..167: note = MISC_FEATURE - Adenosine deaminase sequence
  REGION 168..199: note = MISC_FEATURE - Linker sequence
  REGION 200..365: note = MISC_FEATURE - Adenosine deaminase sequence
  REGION 366..397: note = MISC_FEATURE - Linker sequence
  REGION 398..1764: note = MISC_FEATURE - Sequence derived from Cas9
  REGION 1765..1786: note = MISC_FEATURE - Bipartite nuclear localization sequence
MSEVEFSHEYWMRHALTLAKRAWDEREVPVGAVLVHNNRVIGEGWNRPIGRHDPTAHAEIMALRQGGLVMQNYRLIDATLYVTLEPCVMCAGAMIHSRIGRVVFGARDAKTGAAGSLMDVLHHPGMNHRVEITEGILADECAALLSDFFRMRRQEIKAQKKAQSSTDSGGSSGGSSGSETPGTSESATPESSGGSSGGSSEVEFSHEYWMRHALTLAKRARDEREVPVGAVLVLNNRVIGEGWNRAIGLHDPTAHAEIMALRQGGLVMQNYRLYDATLYVTFEPCVMCAGAMIHSRIGRVVFGVRNAKTGAAGSLMDVLHHPGMNHRVEITEGILADECAALLCRFFRMPRRVFNAQKKAQSSTDSGGSSGGSSGSETPGTSESATPESSGGSSGGSDKKYSIGLAIGTNSVGWAVITDEYKVPSKKFKVLGNTDRHSIKKNLIGALLFDSGETAEATRLKRTARRRYTRRKNRICYLQEIFSNEMAKVDDSFFHRLEESFLVEEDKKHERHPIFGNIVDEVAYHEKYPTIYHLRKKLVDSTDKADLRLIYLALAHMIKFRGHFLIEGDLNPDNSDVDKLFIQLVQTYNQLFEENPINASGVDAKAILSARLSKSRRLENLIAQLPGEKKNGLFGNLIALSLGLTPNFKSNFDLAEDAKLQLSKDTYDDDLDNLLAQIGDQYADLFLAAKNLSDAILLSDILRVNTEITKAPLSASMIKRYDEHHQDLTLLKALVRQQLPEKYKEIFFDQSKNGYAGYIDGGASQEEFYKFIKPILEKMDGTEELLVKLNREDLLRKQRTFDNGSIPHQIHLGELHAILRRQEDFYPFLKDNREKIEKILTFRIPYYVGPLARGNSRFAWMTRKSEETITPWNFEEVVDKGASAQSFIERMTNFDKNLPNEKVLPKHSLLYEYFTVYNELTKVKYVTEGMRKPAFLSGEQKKAIVDLLFKTNRKVTVKQLKEDYFKKIECFDSVEISGVEDRFNASLGTYHDLLKIIKDKDFLDNEENEDILEDIVLTLTLFEDREMIEERLKTYAHLFDDKVMKQLKRRRYTGWGRLSRKLINGIRDKQSGKTILDFLKSDGFANRNFMQLIHDDSLTFKEDIQKAQVSGQGDSLHEHIANLAGSPAIKKGILQTVKVVDELVKVMGRHKPENIVIEMARENQTTQKGQKNSRERMKRIEEGIKELGSQILKEHPVENTQLQNEKLYLYYLQNGRDMYVDQELDINRLSDYDVDHIVPQSFLKDDSIDNKVLTRSDKNRGKSDNVPSEEVVKKMKNYWRQLLNAKLITQRKFDNLTKAERGGLSELDKAGFIKRQLVETRQITKHVAQILDSRMNTKYDENDKLIREVKVITLKSKLVSDFRKDFQFYKVREINNYHHAHDAYLNAVVGTALIKKYPKLESEFVYGDYKVYDVRKMIAKSEQEIGKATAKYFFYSNIMNFFKTEITLANGEIRKRPLIETNGETGEIVWDKGRDFATVRKVLSMPQVNIVKKTEVQTGGFSKESILPKRNSDKLIARKKDWDPKKYGGFDSPTVAYSVLVVAKVEKGKSKKLKSVKELLGITIMERSSFEKNPIDFLEAKGYKEVKKDLIIKLPKYSLFELENGRKRMLASAGELQKGNELALPSKYVNFLYLASHYEKLKGSPEDNEQKQLFVEQHKHYLDEIIEQISEFSKRVILADANLDKVLSAYNKHRDKPIREQAENIIHLFTLTNLGAPAAFKYFDTTIDRKRYTSTKEVLDATLIHQSITGLYETRIDLSQLGGDEGADKRTADGSEFESPKKKRKV

SEQ ID NO: 337 - protein, 1588 aa, synthetic construct
  REGION 1..1588: note = ABE8.17-m polypeptide sequence
  REGION 1..167: note = MISC_FEATURE - Adenosine deaminase sequence
  REGION 168..199: note = MISC_FEATURE - Linker sequence
  REGION 200..1566: note = MISC_FEATURE - Sequence derived from Cas9
  REGION 1567..1588: note = MISC_FEATURE - Bipartite nuclear localization sequence
MSEVEFSHEYWMRHALTLAKRARDEREVPVGAVLVLNNRVIGEGWNRAIGLHDPTAHAEIMALRQGGLVMQNYRLIDATLYSTFEPCVMCAGAMIHSRIGRVVFGVRNAKTGAAGSLMDVLHYPGMNHRVEITEGILADECAALLCYFFRMPRRVFNAQKKAQSSTDSGGSSGGSSGSETPGTSESATPESSGGSSGGSDKKYSIGLAIGTNSVGWAVITDEYKVPSKKFKVLGNTDRHSIKKNLIGALLFDSGETAEATRLKRTARRRYTRRKNRICYLQEIFSNEMAKVDDSFFHRLEESFLVEEDKKHERHPIFGNIVDEVAYHEKYPTIYHLRKKLVDSTDKADLRLIYLALAHMIKFRGHFLIEGDLNPDNSDVDKLFIQLVQTYNQLFEENPINASGVDAKAILSARLSKSRRLENLIAQLPGEKKNGLFGNLIALSLGLTPNFKSNFDLAEDAKLQLSKDTYDDDLDNLLAQIGDQYADLFLAAKNLSDAILLSDILRVNTEITKAPLSASMIKRYDEHHQDLTLLKALVRQQLPEKYKEIFFDQSKNGYAGYIDGGASQEEFYKFIKPILEKMDGTEELLVKLNREDLLRKQRTFDNGSIPHQIHLGELHAILRRQEDFYPFLKDNREKIEKILTFRIPYYVGPLARGNSRFAWMTRKSEETITPWNFEEVVDKGASAQSFIERMTNFDKNLPNEKVLPKHSLLYEYFTVYNELTKVKYVTEGMRKPAFLSGEQKKAIVDLLFKTNRKVTVKQLKEDYFKKIECFDSVEISGVEDRFNASLGTYHDLLKIIKDKDFLDNEENEDILEDIVLTLTLFEDREMIEERLKTYAHLFDDKVMKQLKRRRYTGWGRLSRKLINGIRDKQSGKTILDFLKSDGFANRNFMQLIHDDSLTFKEDIQKAQVSGQGDSLHEHIANLAGSPAIKKGILQTVKVVDELVKVMGRHKPENIVIEMARENQTTQKGQKNSRERMKRIEEGIKELGSQILKEHPVENTQLQNEKLYLYYLQNGRDMYVDQELDINRLSDYDVDHIVPQSFLKDDSIDNKVLTRSDKNRGKSDNVPSEEVVKKMKNYWRQLLNAKLITQRKFDNLTKAERGGLSELDKAGFIKRQLVETRQITKHVAQILDSRMNTKYDENDKLIREVKVITLKSKLVSDFRKDFQFYKVREINNYHHAHDAYLNAVVGTALIKKYPKLESEFVYGDYKVYDVRKMIAKSEQEIGKATAKYFFYSNIMNFFKTEITLANGEIRKRPLIETNGETGEIVWDKGRDFATVRKVLSMPQVNIVKKTEVQTGGFSKESILPKRNSDKLIARKKDWDPKKYGGFDSPTVAYSVLVVAKVEKGKSKKLKSVKELLGITIMERSSFEKNPIDFLEAKGYKEVKKDLIIKLPKYSLFELENGRKRMLASAGELQKGNELALPSKYVNFLYLASHYEKLKGSPEDNEQKQLFVEQHKHYLDEIIEQISEFSKRVILADANLDKVLSAYNKHRDKPIREQAENIIHLFTLTNLGAPAAFKYFDTTIDRKRYTSTKEVLDATLIHQSITGLYETRIDLSQLGGDEGADKRTADGSEFESPKKKRKV

SEQ ID NO: 338 - protein, 1786 aa, synthetic construct
  REGION 1..1786: note = ABE8.17-d polypeptide sequence
  REGION 1..167: note = MISC_FEATURE - Adenosine deaminase sequence
  REGION 168..199: note = MISC_FEATURE - Linker sequence
  REGION 200..365: note = MISC_FEATURE - Adenosine deaminase sequence
  REGION 366..397: note = MISC_FEATURE - Linker sequence
  REGION 398..1764: note = MISC_FEATURE - Sequence derived from Cas9
  REGION 1765..1786: note = MISC_FEATURE - Bipartite nuclear localization sequence
MSEVEFSHEYWMRHALTLAKRAWDEREVPVGAVLVHNNRVIGEGWNRPIGRHDPTAHAEIMALRQGGLVMQNYRLIDATLYVTLEPCVMCAGAMIHSRIGRVVFGARDAKTGAAGSLMDVLHHPGMNHRVEITEGILADECAALLSDFFRMRRQEIKAQKKAQSSTDSGGSSGGSSGSETPGTSESATPESSGGSSGGSSEVEFSHEYWMRHALTLAKRARDEREVPVGAVLVLNNRVIGEGWNRAIGLHDPTAHAEIMALRQGGLVMQNYRLIDATLYSTFEPCVMCAGAMIHSRIGRVVFGVRNAKTGAAGSLMDVLHYPGMNHRVEITEGILADECAALLCYFFRMPRRVFNAQKKAQSSTDSGGSSGGSSGSETPGTSESATPESSGGSSGGSDKKYSIGLAIGTNSVGWAVITDEYKVPSKKFKVLGNTDRHSIKKNLIGALLFDSGETAEATRLKRTARRRYTRRKNRICYLQEIFSNEMAKVDDSFFHRLEESFLVEEDKKHERHPIFGNIVDEVAYHEKYPTIYHLRKKLVDSTDKADLRLIYLALAHMIKFRGHFLIEGDLNPDNSDVDKLFIQLVQTYNQLFEENPINASGVDAKAILSARLSKSRRLENLIAQLPGEKKNGLFGNLIALSLGLTPNFKSNFDLAEDAKLQLSKDTYDDDLDNLLAQIGDQYADLFLAAKNLSDAILLSDILRVNTEITKAPLSASMIKRYDEHHQDLTLLKALVRQQLPEKYKEIFFDQSKNGYAGYIDGGASQEEFYKFIKPILEKMDGTEELLVKLNREDLLRKQRTFDNGSIPHQIHLGELHAILRRQEDFYPFLKDNREKIEKILTFRIPYYVGPLARGNSRFAWMTRKSEETITPWNFEEVVDKGASAQSFIERMTNFDKNLPNEKVLPKHSLLYEYFTVYNELTKVKYVTEGMRKPAFLSGEQKKAIVDLLFKTNRKVTVKQLKEDYFKKIECFDSVEISGVEDRFNASLGTYHDLLKIIKDKDFLDNEENEDILEDIVLTLTLFEDREMIEERLKTYAHLFDDKVMKQLKRRRYTGWGRLSRKLINGIRDKQSGKTILDFLKSDGFANRNFMQLIHDDSLTFKEDIQKAQVSGQGDSLHEHIANLAGSPAIKKGILQTVKVVDELVKVMGRHKPENIVIEMARENQTTQKGQKNSRERMKRIEEGIKELGSQILKEHPVENTQLQNEKLYLYYLQNGRDMYVDQELDINRLSDYDVDHIVPQSFLKDDSIDNKVLTRSDKNRGKSDNVPSEEVVKKMKNYWRQLLNAKLITQRKFDNLTKAERGGLSELDKAGFIKRQLVETRQITKHVAQILDSRMNTKYDENDKLIREVKVITLKSKLVSDFRKDFQFYKVREINNYHHAHDAYLNAVVGTALIKKYPKLESEFVYGDYKVYDVRKMIAKSEQEIGKATAKYFFYSNIMNFFKTEITLANGEIRKRPLIETNGETGEIVWDKGRDFATVRKVLSMPQVNIVKKTEVQTGGFSKESILPKRNSDKLIARKKDWDPKKYGGFDSPTVAYSVLVVAKVEKGKSKKLKSVKELLGITIMERSSFEKNPIDFLEAKGYKEVKKDLIIKLPKYSLFELENGRKRMLASAGELQKGNELALPSKYVNFLYLASHYEKLKGSPEDNEQKQLFVEQHKHYLDEIIEQISEFSKRVILADANLDKVLSAYNKHRDKPIREQAENIIHLFTLTNLGAPAAFKYFDTTIDRKRYTSTKEVLDATLIHQSITGLYETRIDLSQLGGDEGADKRTADGSEFESPKKKRKV

SEQ ID NO: 339 - protein, 1588 aa, synthetic construct
  REGION 1..1588: note = ABE8.20-m polypeptide sequence
  REGION 1..167: note = MISC_FEATURE - Adenosine deaminase sequence
  REGION 168..199: note = MISC_FEATURE - Linker sequence
  REGION 200..1566: note = MISC_FEATURE - Sequence derived from Cas9
  REGION 1567..1588: note = MISC_FEATURE - Bipartite nuclear localization sequence
MSEVEFSHEYWMRHALTLAKRARDEREVPVGAVLVLNNRVIGEGWNRAIGLHDPTAHAEIMALRQGGLVMQNYRLYDATLYSTFEPCVMCAGAMIHSRIGRVVFGVRNAKTGAAGSLMDVLHHPGMNHRVEITEGILADECAALLCRFFRMPRRVFNAQKKAQSSTDSGGSSGGSSGSETPGTSESATPESSGGSSGGSDKKYSIGLAIGTNSVGWAVITDEYKVPSKKFKVLGNTDRHSIKKNLIGALLFDSGETAEATRLKRTARRRYTRRKNRICYLQEIFSNEMAKVDDSFFHRLEESFLVEEDKKHERHPIFGNIVDEVAYHEKYPTIYHLRKKLVDSTDKADLRLIYLALAHMIKFRGHFLIEGDLNPDNSDVDKLFIQLVQTYNQLFEENPINASGVDAKAILSARLSKSRRLENLIAQLPGEKKNGLFGNLIALSLGLTPNFKSNFDLAEDAKLQLSKDTYDDDLDNLLAQIGDQYADLFLAAKNLSDAILLSDILRVNTEITKAPLSASMIKRYDEHHQDLTLLKALVRQQLPEKYKEIFFDQSKNGYAGYIDGGASQEEFYKFIKPILEKMDGTEELLVKLNREDLLRKQRTFDNGSIPHQIHLGELHAILRRQEDFYPFLKDNREKIEKILTFRIPYYVGPLARGNSRFAWMTRKSEETITPWNFEEVVDKGASAQSFIERMTNFDKNLPNEKVLPKHSLLYEYFTVYNELTKVKYVTEGMRKPAFLSGEQKKAIVDLLFKTNRKVTVKQLKEDYFKKIECFDSVEISGVEDRFNASLGTYHDLLKIIKDKDFLDNEENEDILEDIVLTLTLFEDREMIEERLKTYAHLFDDKVMKQLKRRRYTGWGRLSRKLINGIRDKQSGKTILDFLKSDGFANRNFMQLIHDDSLTFKEDIQKAQVSGQGDSLHEHIANLAGSPAIKKGILQTVKVVDELVKVMGRHKPENIVIEMARENQTTQKGQKNSRERMKRIEEGIKELGSQILKEHPVENTQLQNEKLYLYYLQNGRDMYVDQELDINRLSDYDVDHIVPQSFLKDDSIDNKVLTRSDKNRGKSDNVPSEEVVKKMKNYWRQLLNAKLITQRKFDNLTKAERGGLSELDKAGFIKRQLVETRQITKHVAQILDSRMNTKYDENDKLIREVKVITLKSKLVSDFRKDFQFYKVREINNYHHAHDAYLNAVVGTALIKKYPKLESEFVYGDYKVYDVRKMIAKSEQEIGKATAKYFFYSNIMNFFKTEITLANGEIRKRPLIETNGETGEIVWDKGRDFATVRKVLSMPQVNIVKKTEVQTGGFSKESILPKRNSDKLIARKKDWDPKKYGGFDSPTVAYSVLVVAKVEKGKSKKLKSVKELLGITIMERSSFEKNPIDFLEAKGYKEVKKDLIIKLPKYSLFELENGRKRMLASAGELQKGNELALPSKYVNFLYLASHYEKLKGSPEDNEQKQLFVEQHKHYLDEIIEQISEFSKRVILADANLDKVLSAYNKHRDKPIREQAENIIHLFTLTNLGAPAAFKYFDTTIDRKRYTSTKEVLDATLIHQSITGLYETRIDLSQLGGDEGADKRTADGSEFESPKKKRKV

SEQ ID NO: 340 - protein, 1786 aa, synthetic construct
  REGION 1..1786: note = ABE8.20-d polypeptide sequence
  REGION 1..167: note = MISC_FEATURE - Adenosine deaminase sequence
  REGION 168..199: note = MISC_FEATURE - Linker sequence
  REGION 200..365: note = MISC_FEATURE - Adenosine deaminase sequence
  REGION 366..397: note = MISC_FEATURE - Linker sequence
  REGION 398..1764: note = MISC_FEATURE - Sequence derived from Cas9
  REGION 1765..1786: note = MISC_FEATURE - Bipartite nuclear localization sequence
MSEVEFSHEYWMRHALTLAKRAWDEREVPVGAVLVHNNRVIGEGWNRPIGRHDPTAHAEIMALRQGGLVMQNYRLIDATLYVTLEPCVMCAGAMIHSRIGRVVFGARDAKTGAAGSLMDVLHHPGMNHRVEITEGILADECAALLSDFFRMRRQEIKAQKKAQSSTDSGGSSGGSSGSETPGTSESATPESSGGSSGGSSEVEFSHEYWMRHALTLAKRARDEREVPVGAVLVLNNRVIGEGWNRAIGLHDPTAHAEIMALRQGGLVMQNYRLYDATLYSTFEPCVMCAGAMIHSRIGRVVFGVRNAKTGAAGSLMDVLHHPGMNHRVEITEGILADECAALLCRFFRMPRRVFNAQKKAQSSTDSGGSSGGSSGSETPGTSESATPESSGGSSGGSDKKYSIGLAIGTNSVGWAVITDEYKVPSKKFKVLGNTDRHSIKKNLIGALLFDSGETAEATRLKRTARRRYTRRKNRICYLQEIFSNEMAKVDDSFFHRLEESFLVEEDKKHERHPIFGNIVDEVAYHEKYPTIYHLRKKLVDSTDKADLRLIYLALAHMIKFRGHFLIEGDLNPDNSDVDKLFIQLVQTYNQLFEENPINASGVDAKAILSARLSKSRRLENLIAQLPGEKKNGLFGNLIALSLGLTPNFKSNFDLAEDAKLQLSKDTYDDDLDNLLAQIGDQYADLFLAAKNLSDAILLSDILRVNTEITKAPLSASMIKRYDEHHQDLTLLKALVRQQLPEKYKEIFFDQSKNGYAGYIDGGASQEEFYKFIKPILEKMDGTEELLVKLNREDLLRKQRTFDNGSIPHQIHLGELHAILRRQEDFYPFLKDNREKIEKILTFRIPYYVGPLARGNSRFAWMTRKSEETITPWNFEEVVDKGASAQSFIERMTNFDKNLPNEKVLPKHSLLYEYFTVYNELTKVKYVTEGMRKPAFLSGEQKKAIVDLLFKTNRKVTVKQLKEDYFKKIECFDSVEISGVEDRFNASLGTYHDLLKIIKDKDFLDNEENEDILEDIVLTLTLFEDREMIEERLKTYAHLFDDKVMKQLKRRRYTGWGRLSRKLINGIRDKQSGKTILDFLKSDGFANRNFMQLIHDDSLTFKEDIQKAQVSGQGDSLHEHIANLAGSPAIKKGILQTVKVVDELVKVMGRHKPENIVIEMARENQTTQKGQKNSRERMKRIEEGIKELGSQILKEHPVENTQLQNEKLYLYYLQNGRDMYVDQELDINRLSDYDVDHIVPQSFLKDDSIDNKVLTRSDKNRGKSDNVPSEEVVKKMKNYWRQLLNAKLITQRKFDNLTKAERGGLSELDKAGFIKRQLVETRQITKHVAQILDSRMNTKYDENDKLIREVKVITLKSKLVSDFRKDFQFYKVREINNYHHAHDAYLNAVVGTALIKKYPKLESEFVYGDYKVYDVRKMIAKSEQEIGKATAKYFFYSNIMNFFKTEITLANGEIRKRPLIETNGETGEIVWDKGRDFATVRKVLSMPQVNIVKKTEVQTGGFSKESILPKRNSDKLIARKKDWDPKKYGGFDSPTVAYSVLVVAKVEKGKSKKLKSVKELLGITIMERSSFEKNPIDFLEAKGYKEVKKDLIIKLPKYSLFELENGRKRMLASAGELQKGNELALPSKYVNFLYLASHYEKLKGSPEDNEQKQLFVEQHKHYLDEIIEQISEFSKRVILADANLDKVLSAYNKHRDKPIREQAENIIHLFTLTNLGAPAAFKYFDTTIDRKRYTSTKEVLDATLIHQSITGLYETRIDLSQLGGDEGADKRTADGSEFESPKKKRKV

SEQ ID NO: 341 - protein, 1588 aa, synthetic construct
  REGION 1..1588: note = 01. monoABE8.1_bpNLS + Y147T polypeptide sequence
MSEVEFSHEYWMRHALTLAKRARDEREVPVGAVLVLNNRVIGEGWNRAIGLHDPTAHAEIMALRQGGLVMQNYRLIDATLYVTFEPCVMCAGAMIHSRIGRVVFGVRNAKTGAAGSLMDVLHYPGMNHRVEITEGILADECAALLCTFFRMPRQVFNAQKKAQSSTDSGGSSGGSSGSETPGTSESATPESSGGSSGGSDKKYSIGLAIGTNSVGWAVITDEYKVPSKKFKVLGNTDRHSIKKNLIGALLFDSGETAEATRLKRTARRRYTRRKNRICYLQEIFSNEMAKVDDSFFHRLEESFLVEEDKKHERHPIFGNIVDEVAYHEKYPTIYHLRKKLVDSTDKADLRLIYLALAHMIKFRGHFLIEGDLNPDNSDVDKLFIQLVQTYNQLFEENPINASGVDAKAILSARLSKSRRLENLIAQLPGEKKNGLFGNLIALSLGLTPNFKSNFDLAEDAKLQLSKDTYDDDLDNLLAQIGDQYADLFLAAKNLSDAILLSDILRVNTEITKAPLSASMIKRYDEHHQDLTLLKALVRQQLPEKYKEIFFDQSKNGYAGYIDGGASQEEFYKFIKPILEKMDGTEELLVKLNREDLLRKQRTFDNGSIPHQIHLGELHAILRRQEDFYPFLKDNREKIEKILTFRIPYYVGPLARGNSRFAWMTRKSEETITPWNFEEVVDKGASAQSFIERMTNFDKNLPNEKVLPKHSLLYEYFTVYNELTKVKYVTEGMRKPAFLSGEQKKAIVDLLFKTNRKVTVKQLKEDYFKKIECFDSVEISGVEDRFNASLGTYHDLLKIIKDKDFLDNEENEDILEDIVLTLTLFEDREMIEERLKTYAHLFDDKVMKQLKRRRYTGWGRLSRKLINGIRDKQSGKTILDFLKSDGFANRNFMQLIHDDSLTFKEDIQKAQVSGQGDSLHEHIANLAGSPAIKKGILQTVKVVDELVKVMGRHKPENIVIEMARENQTTQKGQKNSRERMKRIEEGIKELGSQILKEHPVENTQLQNEKLYLYYLQNGRDMYVDQELDINRLSDYDVDHIVPQSFLKDDSIDNKVLTRSDKNRGKSDNVPSEEVVKKMKNYWRQLLNAKLITQRKFDNLTKAERGGLSELDKAGFIKRQLVETRQITKHVAQILDSRMNTKYDENDKLIREVKVITLKSKLVSDFRKDFQFYKVREINNYHHAHDAYLNAVVGTALIKKYPKLESEFVYGDYKVYDVRKMIAKSEQEIGKATAKYFFYSNIMNFFKTEITLANGEIRKRPLIETNGETGEIVWDKGRDFATVRKVLSMPQVNIVKKTEVQTGGFSKESILPKRNSDKLIARKKDWDPKKYGGFVSPTVAYSVLVVAKVEKGKSKKLKSVKELLGITIMERSSFEKNPIDFLEAKGYKEVKKDLIIKLPKYSLFELENGRKRMLASARELQKGNELALPSKYVNFLYLASHYEKLKGSPEDNEQKQLFVEQHKHYLDEIIEQISEFSKRVILADANLDKVLSAYNKHRDKPIREQAENIIHLFTLTNLGAPAAFKYFDTTIDRKQYRSTKEVLDATLIHQSITGLYETRIDLSQLGGDEGADKRTADGSEFESPKKKRKV

SEQ ID NO: 342 - protein, 1588 aa, synthetic construct
  REGION 1..1588: note = 02. monoABE8.1_bpNLS + Y147R polypeptide sequence
MSEVEFSHEYWMRHALTLAKRARDEREVPVGAVLVLNNRVIGEGWNRAIGLHDPTAHAEIMALRQGGLVMQNYRLIDATLYVTFEPCVMCAGAMIHSRIGRVVFGVRNAKTGAAGSLMDVLHYPGMNHRVEITEGILADECAALLCRFFRMPRQVFNAQKKAQSSTDSGGSSGGSSGSETPGTSESATPESSGGSSGGSDKKYSIGLAIGTNSVGWAVITDEYKVPSKKFKVLGNTDRHSIKKNLIGALLFDSGETAEATRLKRTARRRYTRRKNRICYLQEIFSNEMAKVDDSFFHRLEESFLVEEDKKHERHPIFGNIVDEVAYHEKYPTIYHLRKKLVDSTDKADLRLIYLALAHMIKFRGHFLIEGDLNPDNSDVDKLFIQLVQTYNQLFEENPINASGVDAKAILSARLSKSRRLENLIAQLPGEKKNGLFGNLIALSLGLTPNFKSNFDLAEDAKLQLSKDTYDDDLDNLLAQIGDQYADLFLAAKNLSDAILLSDILRVNTEITKAPLSASMIKRYDEHHQDLTLLKALVRQQLPEKYKEIFFDQSKNGYAGYIDGGASQEEFYKFIKPILEKMDGTEELLVKLNREDLLRKQRTFDNGSIPHQIHLGELHAILRRQEDFYPFLKDNREKIEKILTFRIPYYVGPLARGNSRFAWMTRKSEETITPWNFEEVVDKGASAQSFIERMTNFDKNLPNEKVLPKHSLLYEYFTVYNELTKVKYVTEGMRKPAFLSGEQKKAIVDLLFKTNRKVTVKQLKEDYFKKIECFDSVEISGVEDRFNASLGTYHDLLKIIKDKDFLDNEENEDILEDIVLTLTLFEDREMIEERLKTYAHLFDDKVMKQLKRRRYTGWGRLSRKLINGIRDKQSGKTILDFLKSDGFANRNFMQLIHDDSLTFKEDIQKAQVSGQGDSLHEHIANLAGSPAIKKGILQTVKVVDELVKVMGRHKPENIVIEMARENQTTQKGQKNSRERMKRIEEGIKELGSQILKEHPVENTQLQNEKLYLYYLQNGRDMYVDQELDINRLSDYDVDHIVPQSFLKDDSIDNKVLTRSDKNRGKSDNVPSEEVVKKMKNYWRQLLNAKLITQRKFDNLTKAERGGLSELDKAGFIKRQLVETRQITKHVAQILDSRMNTKYDENDKLIREVKVITLKSKLVSDFRKDFQFYKVREINNYHHAHDAYLNAVVGTALIKKYPKLESEFVYGDYKVYDVRKMIAKSEQEIGKATAKYFFYSNIMNFFKTEITLANGEIRKRPLIETNGETGEIVWDKGRDFATVRKVLSMPQVNIVKKTEVQTGGFSKESILPKRNSDKLIARKKDWDPKKYGGFVSPTVAYSVLVVAKVEKGKSKKLKSVKELLGITIMERSSFEKNPIDFLEAKGYKEVKKDLIIKLPKYSLFELENGRKRMLASARELQKGNELALPSKYVNFLYLASHYEKLKGSPEDNEQKQLFVEQHKHYLDEIIEQISEFSKRVILADANLDKVLSAYNKHRDKPIREQAENIIHLFTLTNLGAPAAFKYFDTTIDRKQYRSTKEVLDATLIHQSITGLYETRIDLSQLGGDEGADKRTADGSEFESPKKKRKV

SEQ ID NO: 343 - protein, 1588 aa, synthetic construct
  REGION 1..1588: note = 03. monoABE8.1_bpNLS + Q154S polypeptide sequence
MSEVEFSHEYWMRHALTLAKRARDEREVPVGAVLVLNNRVIGEGWNRAIGLHDPTAHAEIMALRQGGLVMQNYRLIDATLYVTFEPCVMCAGAMIHSRIGRVVFGVRNAKTGAAGSLMDVLHYPGMNHRVEITEGILADECAALLCYFFRMPRSVFNAQKKAQSSTDSGGSSGGSSGSETPGTSESATPESSGGSSGGSDKKYSIGLAIGTNSVGWAVITDEYKVPSKKFKVLGNTDRHSIKKNLIGALLFDSGETAEATRLKRTARRRYTRRKNRICYLQEIFSNEMAKVDDSFFHRLEESFLVEEDKKHERHPIFGNIVDEVAYHEKYPTIYHLRKKLVDSTDKADLRLIYLALAHMIKFRGHFLIEGDLNPDNSDVDKLFIQLVQTYNQLFEENPINASGVDAKAILSARLSKSRRLENLIAQLPGEKKNGLFGNLIALSLGLTPNFKSNFDLAEDAKLQLSKDTYDDDLDNLLAQIGDQYADLFLAAKNLSDAILLSDILRVNTEITKAPLSASMIKRYDEHHQDLTLLKALVRQQLPEKYKEIFFDQSKNGYAGYIDGGASQEEFYKFIKPILEKMDGTEELLVKLNREDLLRKQRTFDNGSIPHQIHLGELHAILRRQEDFYPFLKDNREKIEKILTFRIPYYVGPLARGNSRFAWMTRKSEETITPWNFEEVVDKGASAQSFIERMTNFDKNLPNEKVLPKHSLLYEYFTVYNELTKVKYVTEGMRKPAFLSGEQKKAIVDLLFKTNRKVTVKQLKEDYFKKIECFDSVEISGVEDRFNASLGTYHDLLKIIKDKDFLDNEENEDILEDIVLTLTLFEDREMIEERLKTYAHLFDDKVMKQLKRRRYTGWGRLSRKLINGIRDKQSGKTILDFLKSDGFANRNFMQLIHDDSLTFKEDIQKAQVSGQGDSLHEHIANLAGSPAIKKGILQTVKVVDELVKVMGRHKPENIVIEMARENQTTQKGQKNSRERMKRIEEGIKELGSQILKEHPVENTQLQNEKLYLYYLQNGRDMYVDQELDINRLSDYDVDHIVPQSFLKDDSIDNKVLTRSDKNRGKSDNVPSEEVVKKMKNYWRQLLNAKLITQRKFDNLTKAERGGLSELDKAGFIKRQLVETRQITKHVAQILDSRMNTKYDENDKLIREVKVITLKSKLVSDFRKDFQFYKVREINNYHHAHDAYLNAVVGTALIKKYPKLESEFVYGDYKVYDVRKMIAKSEQEIGKATAKYFFYSNIMNFFKTEITLANGEIRKRPLIETNGETGEIVWDKGRDFATVRKVLSMPQVNIVKKTEVQTGGFSKESILPKRNSDKLIARKKDWDPKKYGGFVSPTVAYSVLVVAKVEKGKSKKLKSVKELLGITIMERSSFEKNPIDFLEAKGYKEVKKDLIIKLPKYSLFELENGRKRMLASARELQKGNELALPSKYVNFLYLASHYEKLKGSPEDNEQKQLFVEQHKHYLDEIIEQISEFSKRVILADANLDKVLSAYNKHRDKPIREQAENIIHLFTLTNLGAPAAFKYFDTTIDRKQYRSTKEVLDATLIHQSITGLYETRIDLSQLGGDEGADKRTADGSEFESPKKKRKV

SEQ ID NO: 344 - protein, 1588 aa, synthetic construct
  REGION 1..1588: note = 04. monoABE8.1_bpNLS + Y123H polypeptide sequence
MSEVEFSHEYWMRHALTLAKRARDEREVPVGAVLVLNNRVIGEGWNRAIGLHDPTAHAEIMALRQGGLVMQNYRLIDATLYVTFEPCVMCAGAMIHSRIGRVVFGVRNAKTGAAGSLMDVLHHPGMNHRVEITEGILADECAALLCYFFRMPRQVFNAQKKAQSSTDSGGSSGGSSGSETPGTSESATPESSGGSSGGSDKKYSIGLAIGTNSVGWAVITDEYKVPSKKFKVLGNTDRHSIKKNLIGALLFDSGETAEATRLKRTARRRYTRRKNRICYLQEIFSNEMAKVDDSFFHRLEESFLVEEDKKHERHPIFGNIVDEVAYHEKYPTIYHLRKKLVDSTDKADLRLIYLALAHMIKFRGHFLIEGDLNPDNSDVDKLFIQLVQTYNQLFEENPINASGVDAKAILSARLSKSRRLENLIAQLPGEKKNGLFGNLIALSLGLTPNFKSNFDLAEDAKLQLSKDTYDDDLDNLLAQIGDQYADLFLAAKNLSDAILLSDILRVNTEITKAPLSASMIKRYDEHHQDLTLLKALVRQQLPEKYKEIFFDQSKNGYAGYIDGGASQEEFYKFIKPILEKMDGTEELLVKLNREDLLRKQRTFDNGSIPHQIHLGELHAILRRQEDFYPFLKDNREKIEKILTFRIPYYVGPLARGNSRFAWMTRKSEETITPWNFEEVVDKGASAQSFIERMTNFDKNLPNEKVLPKHSLLYEYFTVYNELTKVKYVTEGMRKPAFLSGEQKKAIVDLLFKTNRKVTVKQLKEDYFKKIECFDSVEISGVEDRFNASLGTYHDLLKIIKDKDFLDNEENEDILEDIVLTLTLFEDREMIEERLKTYAHLFDDKVMKQLKRRRYTGWGRLSRKLINGIRDKQSGKTILDFLKSDGFANRNFMQLIHDDSLTFKEDIQKAQVSGQGDSLHEHIANLAGSPAIKKGILQTVKVVDELVKVMGRHKPENIVIEMARENQTTQKGQKNSRERMKRIEEGIKELGSQILKEHPVENTQLQNEKLYLYYLQNGRDMYVDQELDINRLSDYDVDHIVPQSFLKDDSIDNKVLTRSDKNRGKSDNVPSEEVVKKMKNYWRQLLNAKLITQRKFDNLTKAERGGLSELDKAGFIKRQLVETRQITKHVAQILDSRMNTKYDENDKLIREVKVITLKSKLVSDFRKDFQFYKVREINNYHHAHDAYLNAVVGTALIKKYPKLESEFVYGDYKVYDVRKMIAKSEQEIGKATAKYFFYSNIMNFFKTEITLANGEIRKRPLIETNGETGEIVWDKGRDFATVRKVLSMPQVNIVKKTEVQTGGFSKESILPKRNSDKLIARKKDWDPKKYGGFVSPTVAYSVLVVAKVEKGKSKKLKSVKELLGITIMERSSFEKNPIDFLEAKGYKEVKKDLIIKLPKYSLFELENGRKRMLASARELQKGNELALPSKYVNFLYLASHYEKLKGSPEDNEQKQLFVEQHKHYLDEIIEQISEFSKRVILADANLDKVLSAYNKHRDKPIREQAENIIHLFTLTNLGAPAAFKYFDTTIDRKQYRSTKEVLDATLIHQSITGLYETRIDLSQLGGDEGADKRTADGSEFESPKKKRKV

SEQ ID NO: 345 - protein, 1588 aa, synthetic construct
  REGION 1..1588: note = 05. monoABE8.1_bpNLS + V82S polypeptide sequence
MSEVEFSHEYWMRHALTLAKRARDEREVPVGAVLVLNNRVIGEGWNRAIGLHDPTAHAEIMALRQGGLVMQNYRLIDATLYSTFEPCVMCAGAMIHSRIGRVVFGVRNAKTGAAGSLMDVLHYPGMNHRVEITEGILADECAALLCYFFRMPRQVFNAQKKAQSSTDSGGSSGGSSGSETPGTSESATPESSGGSSGGSDKKYSIGLAIGTNSVGWAVITDEYKVPSKKFKVLGNTDRHSIKKNLIGALLFDSGETAEATRLKRTARRRYTRRKNRICYLQEIFSNEMAKVDDSFFHRLEESFLVEEDKKHERHPIFGNIVDEVAYHEKYPTIYHLRKKLVDSTDKADLRLIYLALAHMIKFRGHFLIEGDLNPDNSDVDKLFIQLVQTYNQLFEENPINASGVDAKAILSARLSKSRRLENLIAQLPGEKKNGLFGNLIALSLGLTPNFKSNFDLAEDAKLQLSKDTYDDDLDNLLAQIGDQYADLFLAAKNLSDAILLSDILRVNTEITKAPLSASMIKRYDEHHQDLTLLKALVRQQLPEKYKEIFFDQSKNGYAGYIDGGASQEEFYKFIKPILEKMDGTEELLVKLNREDLLRKQRTFDNGSIPHQIHLGELHAILRRQEDFYPFLKDNREKIEKILTFRIPYYVGPLARGNSRFAWMTRKSEETITPWNFEEVVDKGASAQSFIERMTNFDKNLPNEKVLPKHSLLYEYFTVYNELTKVKYVTEGMRKPAFLSGEQKKAIVDLLFKTNRKVTVKQLKEDYFKKIECFDSVEISGVEDRFNASLGTYHDLLKIIKDKDFLDNEENEDILEDIVLTLTLFEDREMIEERLKTYAHLFDDKVMKQLKRRRYTGWGRLSRKLINGIRDKQSGKTILDFLKSDGFANRNFMQLIHDDSLTFKEDIQKAQVSGQGDSLHEHIANLAGSPAIKKGILQTVKVVDELVKVMGRHKPENIVIEMARENQTTQKGQKNSRERMKRIEEGIKELGSQILKEHPVENTQLQNEKLYLYYLQNGRDMYVDQELDINRLSDYDVDHIVPQSFLKDDSIDNKVLTRSDKNRGKSDNVPSEEVVKKMKNYWRQLLNAKLITQRKFDNLTKAERGGLSELDKAGFIKRQLVETRQITKHVAQILDSRMNTKYDENDKLIREVKVITLKSKLVSDFRKDFQFYKVREINNYHHAHDAYLNAVVGTALIKKYPKLESEFVYGDYKVYDVRKMIAKSEQEIGKATAKYFFYSNIMNFFKTEITLANGEIRKRPLIETNGETGEIVWDKGRDFATVRKVLSMPQVNIVKKTEVQTGGFSKESILPKRNSDKLIARKKDWDPKKYGGFVSPTVAYSVLVVAKVEKGKSKKLKSVKELLGITIMERSSFEKNPIDFLEAKGYKEVKKDLIIKLPKYSLFELENGRKRMLASARELQKGNELALPSKYVNFLYLASHYEKLKGSPEDNEQKQLFVEQHKHYLDEIIEQISEFSKRVILADANLDKVLSAYNKHRDKPIREQAENIIHLFTLTNLGAPAAFKYFDTTIDRKQYRSTKEVLDATLIHQSITGLYETRIDLSQLGGDEGADKRTADGSEFESPKKKRKV

SEQ ID NO: 346 - protein, 1588 aa, synthetic construct
  REGION 1..1588: note = 06. monoABE8.1_bpNLS + T166R polypeptide sequence
MSEVEFSHEYWMRHALTLAKRARDEREVPVGAVLVLNNRVIGEGWNRAIGLHDPTAHAEIMALRQGGLVMQNYRLIDATLYVTFEPCVMCAGAMIHSRIGRVVFGVRNAKTGAAGSLMDVLHYPGMNHRVEITEGILADECAALLCYFFRMPRQVFNAQKKAQSSRDSGGSSGGSSGSETPGTSESATPESSGGSSGGSDKKYSIGLAIGTNSVGWAVITDEYKVPSKKFKVLGNTDRHSIKKNLIGALLFDSGETAEATRLKRTARRRYTRRKNRICYLQEIFSNEMAKVDDSFFHRLEESFLVEEDKKHERHPIFGNIVDEVAYHEKYPTIYHLRKKLVDSTDKADLRLIYLALAHMIKFRGHFLIEGDLNPDNSDVDKLFIQLVQTYNQLFEENPINASGVDAKAILSARLSKSRRLENLIAQLPGEKKNGLFGNLIALSLGLTPNFKSNFDLAEDAKLQLSKDTYDDDLDNLLAQIGDQYADLFLAAKNLSDAILLSDILRVNTEITKAPLSASMIKRYDEHHQDLTLLKALVRQQLPEKYKEIFFDQSKNGYAGYIDGGASQEEFYKFIKPILEKMDGTEELLVKLNREDLLRKQRTFDNGSIPHQIHLGELHAILRRQEDFYPFLKDNREKIEKILTFRIPYYVGPLARGNSRFAWMTRKSEETITPWNFEEVVDKGASAQSFIERMTNFDKNLPNEKVLPKHSLLYEYFTVYNELTKVKYVTEGMRKPAFLSGEQKKAIVDLLFKTNRKVTVKQLKEDYFKKIECFDSVEISGVEDRFNASLGTYHDLLKIIKDKDFLDNEENEDILEDIVLTLTLFEDREMIEERLKTYAHLFDDKVMKQLKRRRYTGWGRLSRKLINGIRDKQSGKTILDFLKSDGFANRNFMQLIHDDSLTFKEDIQKAQVSGQGDSLHEHIANLAGSPAIKKGILQTVKVVDELVKVMGRHKPENIVIEMARENQTTQKGQKNSRERMKRIEEGIKELGSQILKEHPVENTQLQNEKLYLYYLQNGRDMYVDQELDINRLSDYDVDHIVPQSFLKDDSIDNKVLTRSDKNRGKSDNVPSEEVVKKMKNYWRQLLNAKLITQRKFDNLTKAERGGLSELDKAGFIKRQLVETRQITKHVAQILDSRMNTKYDENDKLIREVKVITLKSKLVSDFRKDFQFYKVREINNYHHAHDAYLNAVVGTALIKKYPKLESEFVYGDYKVYDVRKMIAKSEQEIGKATAKYFFYSNIMNFFKTEITLANGEIRKRPLIETNGETGEIVWDKGRDFATVRKVLSMPQVNIVKKTEVQTGGFSKESILPKRNSDKLIARKKDWDPKKYGGFVSPTVAYSVLVVAKVEKGKSKKLKSVKELLGITIMERSSFEKNPIDFLEAKGYKEVKKDLIIKLPKYSLFELENGRKRMLASARELQKGNELALPSKYVNFLYLASHYEKLKGSPEDNEQKQLFVEQHKHYLDEIIEQISEFSKRVILADANLDKVLSAYNKHRDKPIREQAENIIHLFTLTNLGAPAAFKYFDTTIDRKQYRSTKEVLDATLIHQSITGLYETRIDLSQLGGDEGADKRTADGSEFESPKKKRKV

SEQ ID NO: 347 - protein, 1588 aa, synthetic construct
  REGION 1..1588: note = 07. monoABE8.1_bpNLS + Q154R polypeptide sequence
MSEVEFSHEYWMRHALTLAKRARDEREVPVGAVLVLNNRVIGEGWNRAIGLHDPTAHAEIMALRQGGLVMQNYRLIDATLYVTFEPCVMCAGAMIHSRIGRVVFGVRNAKTGAAGSLMDVLHYPGMNHRVEITEGILADECAALLCYFFRMPRRVFNAQKKAQSSTDSGGSSGGSSGSETPGTSESATPESSGGSSGGSDKKYSIGLAIGTNSVGWAVITDEYKVPSKKFKVLGNTDRHSIKKNLIGALLFDSGETAEATRLKRTARRRYTRRKNRICYLQEIFSNEMAKVDDSFFHRLEESFLVEEDKKHERHPIFGNIVDEVAYHEKYPTIYHLRKKLVDSTDKADLRLIYLALAHMIKFRGHFLIEGDLNPDNSDVDKLFIQLVQTYNQLFEENPINASGVDAKAILSARLSKSRRLENLIAQLPGEKKNGLFGNLIALSLGLTPNFKSNFDLAEDAKLQLSKDTYDDDLDNLLAQIGDQYADLFLAAKNLSDAILLSDILRVNTEITKAPLSASMIKRYDEHHQDLTLLKALVRQQLPEKYKEIFFDQSKNGYAGYIDGGASQEEFYKFIKPILEKMDGTEELLVKLNREDLLRKQRTFDNGSIPHQIHLGELHAILRRQEDFYPFLKDNREKIEKILTFRIPYYVGPLARGNSRFAWMTRKSEETITPWNFEEVVDKGASAQSFIERMTNFDKNLPNEKVLPKHSLLYEYFTVYNELTKVKYVTEGMRKPAFLSGEQKKAIVDLLFKTNRKVTVKQLKEDYFKKIECFDSVEISGVEDRFNASLGTYHDLLKIIKDKDFLDNEENEDILEDIVLTLTLFEDREMIEERLKTYAHLFDDKVMKQLKRRRYTGWGRLSRKLINGIRDKQSGKTILDFLKSDGFANRNFMQLIHDDSLTFKEDIQKAQVSGQGDSLHEHIANLAGSPAIKKGILQTVKVVDELVKVMGRHKPENIVIEMARENQTTQKGQKNSRERMKRIEEGIKELGSQILKEHPVENTQLQNEKLYLYYLQNGRDMYVDQELDINRLSDYDVDHIVPQSFLKDDSIDNKVLTRSDKNRGKSDNVPSEEVVKKMKNYWRQLLNAKLITQRKFDNLTKAERGGLSELDKAGFIKRQLVETRQITKHVAQILDSRMNTKYDENDKLIREVKVITLKSKLVSDFRKDFQFYKVREINNYHHAHDAYLNAVVGTALIKKYPKLESEFVYGDYKVYDVRKMIAKSEQEIGKATAKYFFYSNIMNFFKTEITLANGEIRKRPLIETNGETGEIVWDKGRDFATVRKVLSMPQVNIVKKTEVQTGGFSKESILPKRNSDKLIARKKDWDPKKYGGFVSPTVAYSVLVVAKVEKGKSKKLKSVKELLGITIMERSSFEKNPIDFLEAKGYKEVKKDLIIKLPKYSLFELENGRKRMLASARELQKGNELALPSKYVNFLYLASHYEKLKGSPEDNEQKQLFVEQHKHYLDEIIEQISEFSKRVILADANLDKVLSAYNKHRDKPIREQAENIIHLFTLTNLGAPAAFKYFDTTIDRKQYRSTKEVLDATLIHQSITGLYETRIDLSQLGGDEGADKRTADGSEFESPKKKRKV

SEQ ID NO: 348 - protein, 1588 aa, synthetic construct
  REGION 1..1588: note = 08. monoABE8.1_bpNLS +Y147R_Q154R_Y123H polypeptide sequence
MSEVEFSHEYWMRHALTLAKRARDEREVPVGAVLVLNNRVIGEGWNRAIGLHDPTAHAEIMALRQGGLVMQNYRLIDATLYVTFEPCVMCAGAMIHSRIGRVVFGVRNAKTGAAGSLMDVLHHPGMNHRVEITEGILADECAALLCRFFRMPRRVFNAQKKAQSSTDSGGSSGGSSGSETPGTSESATPESSGGSSGGSDKKYSIGLAIGTNSVGWAVITDEYKVPSKKFKVLGNTDRHSIKKNLIGALLFDSGETAEATRLKRTARRRYTRRKNRICYLQEIFSNEMAKVDDSFFHRLEESFLVEEDKKHERHPIFGNIVDEVAYHEKYPTIYHLRKKLVDSTDKADLRLIYLALAHMIKFRGHFLIEGDLNPDNSDVDKLFIQLVQTYNQLFEENPINASGVDAKAILSARLSKSRRLENLIAQLPGEKKNGLFGNLIALSLGLTPNFKSNFDLAEDAKLQLSKDTYDDDLDNLLAQIGDQYADLFLAAKNLSDAILLSDILRVNTEITKAPLSASMIKRYDEHHQDLTLLKALVRQQLPEKYKEIFFDQSKNGYAGYIDGGASQEEFYKFIKPILEKMDGTEELLVKLNREDLLRKQRTFDNGSIPHQIHLGELHAILRRQEDFYPFLKDNREKIEKILTFRIPYYVGPLARGNSRFAWMTRKSEETITPWNFEEVVDKGASAQSFIERMTNFDKNLPNEKVLPKHSLLYEYFTVYNELTKVKYVTEGMRKPAFLSGEQKKAIVDLLFKTNRKVTVKQLKEDYFKKIECFDSVEISGVEDRFNASLGTYHDLLKIIKDKDFLDNEENEDILEDIVLTLTLFEDREMIEERLKTYAHLFDDKVMKQLKRRRYTGWGRLSRKLINGIRDKQSGKTILDFLKSDGFANRNFMQLIHDDSLTFKEDIQKAQVSGQGDSLHEHIANLAGSPAIKKGILQTVKVVDELVKVMGRHKPENIVIEMARENQTTQKGQKNSRERMKRIEEGIKELGSQILKEHPVENTQLQNEKLYLYYLQNGRDMYVDQELDINRLSDYDVDHIVPQSFLKDDSIDNKVLTRSDKNRGKSDNVPSEEVVKKMKNYWRQLLNAKLITQRKFDNLTKAERGGLSELDKAGFIKRQLVETRQITKHVAQILDSRMNTKYDENDKLIREVKVITLKSKLVSDFRKDFQFYKVREINNYHHAHDAYLNAVVGTALIKKYPKLESEFVYGDYKVYDVRKMIAKSEQEIGKATAKYFFYSNIMNFFKTEITLANGEIRKRPLIETNGETGEIVWDKGRDFATVRKVLSMPQVNIVKKTEVQTGGFSKESILPKRNSDKLIARKKDWDPKKYGGFVSPTVAYSVLVVAKVEKGKSKKLKSVKELLGITIMERSSFEKNPIDFLEAKGYKEVKKDLIIKLPKYSLFELENGRKRMLASARELQKGNELALPSKYVNFLYLASHYEKLKGSPEDNEQKQLFVEQHKHYLDEIIEQISEFSKRVILADANLDKVLSAYNKHRDKPIREQAENIIHLFTLTNLGAPAAFKYFDTTIDRKQYRSTKEVLDATLIHQSITGLYETRIDLSQLGGDEGADKRTADGSEFESPKKKRKV

SEQ ID NO: 349 - protein, 1588 aa, synthetic construct
  REGION 1..1588: note = 09. monoABE8.1_bpNLS +Y147R_Q154R_I76Y polypeptide sequence
MSEVEFSHEYWMRHALTLAKRARDEREVPVGAVLVLNNRVIGEGWNRAIGLHDPTAHAEIMALRQGGLVMQNYRLYDATLYVTFEPCVMCAGAMIHSRIGRVVFGVRNAKTGAAGSLMDVLHYPGMNHRVEITEGILADECAALLCRFFRMPRRVFNAQKKAQSSTDSGGSSGGSSGSETPGTSESATPESSGGSSGGSDKKYSIGLAIGTNSVGWAVITDEYKVPSKKFKVLGNTDRHSIKKNLIGALLFDSGETAEATRLKRTARRRYTRRKNRICYLQEIFSNEMAKVDDSFFHRLEESFLVEEDKKHERHPIFGNIVDEVAYHEKYPTIYHLRKKLVDSTDKADLRLIYLALAHMIKFRGHFLIEGDLNPDNSDVDKLFIQLVQTYNQLFEENPINASGVDAKAILSARLSKSRRLENLIAQLPGEKKNGLFGNLIALSLGLTPNFKSNFDLAEDAKLQLSKDTYDDDLDNLLAQIGDQYADLFLAAKNLSDAILLSDILRVNTEITKAPLSASMIKRYDEHHQDLTLLKALVRQQLPEKYKEIFFDQSKNGYAGYIDGGASQEEFYKFIKPILEKMDGTEELLVKLNREDLLRKQRTFDNGSIPHQIHLGELHAILRRQEDFYPFLKDNREKIEKILTFRIPYYVGPLARGNSRFAWMTRKSEETITPWNFEEVVDKGASAQSFIERMTNFDKNLPNEKVLPKHSLLYEYFTVYNELTKVKYVTEGMRKPAFLSGEQKKAIVDLLFKTNRKVTVKQLKEDYFKKIECFDSVEISGVEDRFNASLGTYHDLLKIIKDKDFLDNEENEDILEDIVLTLTLFEDREMIEERLKTYAHLFDDKVMKQLKRRRYTGWGRLSRKLINGIRDKQSGKTILDFLKSDGFANRNFMQLIHDDSLTFKEDIQKAQVSGQGDSLHEHIANLAGSPAIKKGILQTVKVVDELVKVMGRHKPENIVIEMARENQTTQKGQKNSRERMKRIEEGIKELGSQILKEHPVENTQLQNEKLYLYYLQNGRDMYVDQELDINRLSDYDVDHIVPQSFLKDDSIDNKVLTRSDKNRGKSDNVPSEEVVKKMKNYWRQLLNAKLITQRKFDNLTKAERGGLSELDKAGFIKRQLVETRQITKHVAQILDSRMNTKYDENDKLIREVKVITLKSKLVSDFRKDFQFYKVREINNYHHAHDAYLNAVVGTALIKKYPKLESEFVYGDYKVYDVRKMIAKSEQEIGKATAKYFFYSNIMNFFKTEITLANGEIRKRPLIETNGETGEIVWDKGRDFATVRKVLSMPQVNIVKKTEVQTGGFSKESILPKRNSDKLIARKKDWDPKKYGGFVSPTVAYSVLVVAKVEKGKSKKLKSVKELLGITIMERSSFEKNPIDFLEAKGYKEVKKDLIIKLPKYSLFELENGRKRMLASARELQKGNELALPSKYVNFLYLASHYEKLKGSPEDNEQKQLFVEQHKHYLDEIIEQISEFSKRVILADANLDKVLSAYNKHRDKPIREQAENIIHLFTLTNLGAPAAFKYFDTTIDRKQYRSTKEVLDATLIHQSITGLYETRIDLSQLGGDEGADKRTADGSEFESPKKKRKV

SEQ ID NO: 350 - protein, 1588 aa, synthetic construct
  REGION 1..1588: note = 10. monoABE8.1_bpNLS +Y147R_Q154R_T166R polypeptide sequence
MSEVEFSHEYWMRHALTLAKRARDEREVPVGAVLVLNNRVIGEGWNRAIGLHDPTAHAEIMALRQGGLVMQNYRLIDATLYVTFEPCVMCAGAMIHSRIGRVVFGVRNAKTGAAGSLMDVLHYPGMNHRVEITEGILADECAALLCRFFRMPRRVFNAQKKAQSSRDSGGSSGGSSGSETPGTSESATPESSGGSSGGSDKKYSIGLAIGTNSVGWAVITDEYKVPSKKFKVLGNTDRHSIKKNLIGALLFDSGETAEATRLKRTARRRYTRRKNRICYLQEIFSNEMAKVDDSFFHRLEESFLVEEDKKHERHPIFGNIVDEVAYHEKYPTIYHLRKKLVDSTDKADLRLIYLALAHMIKFRGHFLIEGDLNPDNSDVDKLFIQLVQTYNQLFEENPINASGVDAKAILSARLSKSRRLENLIAQLPGEKKNGLFGNLIALSLGLTPNFKSNFDLAEDAKLQLSKDTYDDDLDNLLAQIGDQYADLFLAAKNLSDAILLSDILRVNTEITKAPLSASMIKRYDEHHQDLTLLKALVRQQLPEKYKEIFFDQSKNGYAGYIDGGASQEEFYKFIKPILEKMDGTEELLVKLNREDLLRKQRTFDNGSIPHQIHLGELHAILRRQEDFYPFLKDNREKIEKILTFRIPYYVGPLARGNSRFAWMTRKSEETITPWNFEEVVDKGASAQSFIERMTNFDKNLPNEKVLPKHSLLYEYFTVYNELTKVKYVTEGMRKPAFLSGEQKKAIVDLLFKTNRKVTVKQLKEDYFKKIECFDSVEISGVEDRFNASLGTYHDLLKIIKDKDFLDNEENEDILEDIVLTLTLFEDREMIEERLKTYAHLFDDKVMKQLKRRRYTGWGRLSRKLINGIRDKQSGKTILDFLKSDGFANRNFMQLIHDDSLTFKEDIQKAQVSGQGDSLHEHIANLAGSPAIKKGILQTVKVVDELVKVMGRHKPENIVIEMARENQTTQKGQKNSRERMKRIEEGIKELGSQILKEHPVENTQLQNEKLYLYYLQNGRDMYVDQELDINRLSDYDVDHIVPQSFLKDDSIDNKVLTRSDKNRGKSDNVPSEEVVKKMKNYWRQLLNAKLITQRKFDNLTKAERGGLSELDKAGFIKRQLVETRQITKHVAQILDSRMNTKYDENDKLIREVKVITLKSKLVSDFRKDFQFYKVREINNYHHAHDAYLNAVVGTALIKKYPKLESEFVYGDYKVYDVRKMIAKSEQEIGKATAKYFFYSNIMNFFKTEITLANGEIRKRPLIETNGETGEIVWDKGRDFATVRKVLSMPQVNIVKKTEVQTGGFSKESILPKRNSDKLIARKKDWDPKKYGGFVSPTVAYSVLVVAKVEKGKSKKLKSVKELLGITIMERSSFEKNPIDFLEAKGYKEVKKDLIIKLPKYSLFELENGRKRMLASARELQKGNELALPSKYVNFLYLASHYEKLKGSPEDNEQKQLFVEQHKHYLDEIIEQISEFSKRVILADANLDKVLSAYNKHRDKPIREQAENIIHLFTLTNLGAPAAFKYFDTTIDRKQYRSTKEVLDATLIHQSITGLYETRIDLSQLGGDEGADKRTADGSEFESPKKKRKV

SEQ ID NO: 351 - protein, 1588 aa, synthetic construct
  REGION 1..1588: note = 11. monoABE8.1_bpNLS +Y147T_Q154R polypeptide sequence
MSEVEFSHEYWMRHALTLAKRARDEREVPVGAVLVLNNRVIGEGWNRAIGLHDPTAHAEIMALRQGGLVMQNYRLIDATLYVTFEPCVMCAGAMIHSRIGRVVFGVRNAKTGAAGSLMDVLHYPGMNHRVEITEGILADECAALLCTFFRMPRRVFNAQKKAQSSTDSGGSSGGSSGSETPGTSESATPESSGGSSGGSDKKYSIGLAIGTNSVGWAVITDEYKVPSKKFKVLGNTDRHSIKKNLIGALLFDSGETAEATRLKRTARRRYTRRKNRICYLQEIFSNEMAKVDDSFFHRLEESFLVEEDKKHERHPIFGNIVDEVAYHEKYPTIYHLRKKLVDSTDKADLRLIYLALAHMIKFRGHFLIEGDLNPDNSDVDKLFIQLVQTYNQLFEENPINASGVDAKAILSARLSKSRRLENLIAQLPGEKKNGLFGNLIALSLGLTPNFKSNFDLAEDAKLQLSKDTYDDDLDNLLAQIGDQYADLFLAAKNLSDAILLSDILRVNTEITKAPLSASMIKRYDEHHQDLTLLKALVRQQLPEKYKEIFFDQSKNGYAGYIDGGASQEEFYKFIKPILEKMDGTEELLVKLNREDLLRKQRTFDNGSIPHQIHLGELHAILRRQEDFYPFLKDNREKIEKILTFRIPYYVGPLARGNSRFAWMTRKSEETITPWNFEEVVDKGASAQSFIERMTNFDKNLPNEKVLPKHSLLYEYFTVYNELTKVKYVTEGMRKPAFLSGEQKKAIVDLLFKTNRKVTVKQLKEDYFKKIECFDSVEISGVEDRFNASLGTYHDLLKIIKDKDFLDNEENEDILEDIVLTLTLFEDREMIEERLKTYAHLFDDKVMKQLKRRRYTGWGRLSRKLINGIRDKQSGKTILDFLKSDGFANRNFMQLIHDDSLTFKEDIQKAQVSGQGDSLHEHIANLAGSPAIKKGILQTVKVVDELVKVMGRHKPENIVIEMARENQTTQKGQKNSRERMKRIEEGIKELGSQILKEHPVENTQLQNEKLYLYYLQNGRDMYVDQELDINRLSDYDVDHIVPQSFLKDDSIDNKVLTRSDKNRGKSDNVPSEEVVKKMKNYWRQLLNAKLITQRKFDNLTKAERGGLSELDKAGFIKRQLVETRQITKHVAQILDSRMNTKYDENDKLIREVKVITLKSKLVSDFRKDFQFYKVREINNYHHAHDAYLNAVVGTALIKKYPKLESEFVYGDYKVYDVRKMIAKSEQEIGKATAKYFFYSNIMNFFKTEITLANGEIRKRPLIETNGETGEIVWDKGRDFATVRKVLSMPQVNIVKKTEVQTGGFSKESILPKRNSDKLIARKKDWDPKKYGGFVSPTVAYSVLVVAKVEKGKSKKLKSVKELLGITIMERSSFEKNPIDFLEAKGYKEVKKDLIIKLPKYSLFELENGRKRMLASARELQKGNELALPSKYVNFLYLASHYEKLKGSPEDNEQKQLFVEQHKHYLDEIIEQISEFSKRVILADANLDKVLSAYNKHRDKPIREQAENIIHLFTLTNLGAPAAFKYFDTTIDRKQYRSTKEVLDATLIHQSITGLYETRIDLSQLGGDEGADKRTADGSEFESPKKKRKV

SEQ ID NO: 352 - protein, 1588 aa, synthetic construct
  REGION 1..1588: note = 12. monoABE8.1_bpNLS +Y147T_Q154S polypeptide sequence
MSEVEFSHEYWMRHALTLAKRARDEREVPVGAVLVLNNRVIGEGWNRAIGLHDPTAHAEIMALRQGGLVMQNYRLIDATLYVTFEPCVMCAGAMIHSRIGRVVFGVRNAKTGAAGSLMDVLHYPGMNHRVEITEGILADECAALLCTFFRMPRSVFNAQKKAQSSTDSGGSSGGSSGSETPGTSESATPESSGGSSGGSDKKYSIGLAIGTNSVGWAVITDEYKVPSKKFKVLGNTDRHSIKKNLIGALLFDSGETAEATRLKRTARRRYTRRKNRICYLQEIFSNEMAKVDDSFFHRLEESFLVEEDKKHERHPIFGNIVDEVAYHEKYPTIYHLRKKLVDSTDKADLRLIYLALAHMIKFRGHFLIEGDLNPDNSDVDKLFIQLVQTYNQLFEENPINASGVDAKAILSARLSKSRRLENLIAQLPGEKKNGLFGNLIALSLGLTPNFKSNFDLAEDAKLQLSKDTYDDDLDNLLAQIGDQYADLFLAAKNLSDAILLSDILRVNTEITKAPLSASMIKRYDEHHQDLTLLKALVRQQLPEKYKEIFFDQSKNGYAGYIDGGASQEEFYKFIKPILEKMDGTEELLVKLNREDLLRKQRTFDNGSIPHQIHLGELHAILRRQEDFYPFLKDNREKIEKILTFRIPYYVGPLARGNSRFAWMTRKSEETITPWNFEEVVDKGASAQSFIERMTNFDKNLPNEKVLPKHSLLYEYFTVYNELTKVKYVTEGMRKPAFLSGEQKKAIVDLLFKTNRKVTVKQLKEDYFKKIECFDSVEISGVEDRFNASLGTYHDLLKIIKDKDFLDNEENEDILEDIVLTLTLFEDREMIEERLKTYAHLFDDKVMKQLKRRRYTGWGRLSRKLINGIRDKQSGKTILDFLKSDGFANRNFMQLIHDDSLTFKEDIQKAQVSGQGDSLHEHIANLAGSPAIKKGILQTVKVVDELVKVMGRHKPENIVIEMARENQTTQKGQKNSRERMKRIEEGIKELGSQILKEHPVENTQLQNEKLYLYYLQNGRDMYVDQELDINRLSDYDVDHIVPQSFLKDDSIDNKVLTRSDKNRGKSDNVPSEEVVKKMKNYWRQLLNAKLITQRKFDNLTKAERGGLSELDKAGFIKRQLVETRQITKHVAQILDSRMNTKYDENDKLIREVKVITLKSKLVSDFRKDFQFYKVREINNYHHAHDAYLNAVVGTALIKKYPKLESEFVYGDYKVYDVRKMIAKSEQEIGKATAKYFFYSNIMNFFKTEITLANGEIRKRPLIETNGETGEIVWDKGRDFATVRKVLSMPQVNIVKKTEVQTGGFSKESILPKRNSDKLIARKKDWDPKKYGGFVSPTVAYSVLVVAKVEKGKSKKLKSVKELLGITIMERSSFEKNPIDFLEAKGYKEVKKDLIIKLPKYSLFELENGRKRMLASARELQKGNELALPSKYVNFLYLASHYEKLKGSPEDNEQKQLFVEQHKHYLDEIIEQISEFSKRVILADANLDKVLSAYNKHRDKPIREQAENIIHLFTLTNLGAPAAFKYFDTTIDRKQYRSTKEVLDATLIHQSITGLYETRIDLSQLGGDEGADKRTADGSEFESPKKKRKV

SEQ ID NO: 353 - protein, 1588 aa, synthetic construct
  REGION 1..1588: note = 13. monoABE8.1_bpNLS +H123Y123H_Y147R_Q154R_I76Y polypeptide sequence
MSEVEFSHEYWMRHALTLAKRARDEREVPVGAVLVLNNRVIGEGWNRAIGLHDPTAHAEIMALRQGGLVMQNYRLYDATLYVTFEPCVMCAGAMIHSRIGRVVFGVRNAKTGAAGSLMDVLHHPGMNHRVEITEGILADECAALLCRFFRMPRRVFNAQKKAQSSTDSGGSSGGSSGSETPGTSESATPESSGGSSGGSDKKYSIGLAIGTNSVGWAVITDEYKVPSKKFKVLGNTDRHSIKKNLIGALLFDSGETAEATRLKRTARRRYTRRKNRICYLQEIFSNEMAKVDDSFFHRLEESFLVEEDKKHERHPIFGNIVDEVAYHEKYPTIYHLRKKLVDSTDKADLRLIYLALAHMIKFRGHFLIEGDLNPDNSDVDKLFIQLVQTYNQLFEENPINASGVDAKAILSARLSKSRRLENLIAQLPGEKKNGLFGNLIALSLGLTPNFKSNFDLAEDAKLQLSKDTYDDDLDNLLAQIGDQYADLFLAAKNLSDAILLSDILRVNTEITKAPLSASMIKRYDEHHQDLTLLKALVRQQLPEKYKEIFFDQSKNGYAGYIDGGASQEEFYKFIKPILEKMDGTEELLVKLNREDLLRKQRTFDNGSIPHQIHLGELHAILRRQEDFYPFLKDNREKIEKILTFRIPYYVGPLARGNSRFAWMTRKSEETITPWNFEEVVDKGASAQSFIERMTNFDKNLPNEKVLPKHSLLYEYFTVYNELTKVKYVTEGMRKPAFLSGEQKKAIVDLLFKTNRKVTVKQLKEDYFKKIECFDSVEISGVEDRFNASLGTYHDLLKIIKDKDFLDNEENEDILEDIVLTLTLFEDREMIEERLKTYAHLFDDKVMKQLKRRRYTGWGRLSRKLINGIRDKQSGKTILDFLKSDGFANRNFMQLIHDDSLTFKEDIQKAQVSGQGDSLHEHIANLAGSPAIKKGILQTVKVVDELVKVMGRHKPENIVIEMARENQTTQKGQKNSRERMKRIEEGIKELGSQILKEHPVENTQLQNEKLYLYYLQNGRDMYVDQELDINRLSDYDVDHIVPQSFLKDDSIDNKVLTRSDKNRGKSDNVPSEEVVKKMKNYWRQLLNAKLITQRKFDNLTKAERGGLSELDKAGFIKRQLVETRQITKHVAQILDSRMNTKYDENDKLIREVKVITLKSKLVSDFRKDFQFYKVREINNYHHAHDAYLNAVVGTALIKKYPKLESEFVYGDYKVYDVRKMIAKSEQEIGKATAKYFFYSNIMNFFKTEITLANGEIRKRPLIETNGETGEIVWDKGRDFATVRKVLSMPQVNIVKKTEVQTGGFSKESILPKRNSDKLIARKKDWDPKKYGGFVSPTVAYSVLVVAKVEKGKSKKLKSVKELLGITIMERSSFEKNPIDFLEAKGYKEVKKDLIIKLPKYSLFELENGRKRMLASARELQKGNELALPSKYVNFLYLASHYEKLKGSPEDNEQKQLFVEQHKHYLDEIIEQISEFSKRVILADANLDKVLSAYNKHRDKPIREQAENIIHLFTLTNLGAPAAFKYFDTTIDRKQYRSTKEVLDATLIHQSITGLYETRIDLSQLGGDEGADKRTADGSEFESPKKKRKV

SEQ ID NO: 354 - protein, 1588 aa, synthetic construct
  REGION 1..1588: note = 14. monoABE8.1_bpNLS + V82S +Q154R polypeptide sequence
MSEVEFSHEYWMRHALTLAKRARDEREVPVGAVLVLNNRVIGEGWNRAIGLHDPTAHAEIMALRQGGLVMQNYRLIDATLYSTFEPCVMCAGAMIHSRIGRVVFGVRNAKTGAAGSLMDVLHYPGMNHRVEITEGILADECAALLCYFFRMPRRVFNAQKKAQSSTDSGGSSGGSSGSETPGTSESATPESSGGSSGGSDKKYSIGLAIGTNSVGWAVITDEYKVPSKKFKVLGNTDRHSIKKNLIGALLFDSGETAEATRLKRTARRRYTRRKNRICYLQEIFSNEMAKVDDSFFHRLEESFLVEEDKKHERHPIFGNIVDEVAYHEKYPTIYHLRKKLVDSTDKADLRLIYLALAHMIKFRGHFLIEGDLNPDNSDVDKLFIQLVQTYNQLFEENPINASGVDAKAILSARLSKSRRLENLIAQLPGEKKNGLFGNLIALSLGLTPNFKSNFDLAEDAKLQLSKDTYDDDLDNLLAQIGDQYADLFLAAKNLSDAILLSDILRVNTEITKAPLSASMIKRYDEHHQDLTLLKALVRQQLPEKYKEIFFDQSKNGYAGYIDGGASQEEFYKFIKPILEKMDGTEELLVKLNREDLLRKQRTFDNGSIPHQIHLGELHAILRRQEDFYPFLKDNREKIEKILTFRIPYYVGPLARGNSRFAWMTRKSEETITPWNFEEVVDKGASAQSFIERMTNFDKNLPNEKVLPKHSLLYEYFTVYNELTKVKYVTEGMRKPAFLSGEQKKAIVDLLFKTNRKVTVKQLKEDYFKKIECFDSVEISGVEDRFNASLGTYHDLLKIIKDKDFLDNEENEDILEDIVLTLTLFEDREMIEERLKTYAHLFDDKVMKQLKRRRYTGWGRLSRKLINGIRDKQSGKTILDFLKSDGFANRNFMQLIHDDSLTFKEDIQKAQVSGQGDSLHEHIANLAGSPAIKKGILQTVKVVDELVKVMGRHKPENIVIEMARENQTTQKGQKNSRERMKRIEEGIKELGSQILKEHPVENTQLQNEKLYLYYLQNGRDMYVDQELDINRLSDYDVDHIVPQSFLKDDSIDNKVLTRSDKNRGKSDNVPSEEVVKKMKNYWRQLLNAKLITQRKFDNLTKAERGGLSELDKAGFIKRQLVETRQITKHVAQILDSRMNTKYDENDKLIREVKVITLKSKLVSDFRKDFQFYKVREINNYHHAHDAYLNAVVGTALIKKYPKLESEFVYGDYKVYDVRKMIAKSEQEIGKATAKYFFYSNIMNFFKTEITLANGEIRKRPLIETNGETGEIVWDKGRDFATVRKVLSMPQVNIVKKTEVQTGGFSKESILPKRNSDKLIARKKDWDPKKYGGFVSPTVAYSVLVVAKVEKGKSKKLKSVKELLGITIMERSSFEKNPIDFLEAKGYKEVKKDLIIKLPKYSLFELENGRKRMLASARELQKGNELALPSKYVNFLYLASHYEKLKGSPEDNEQKQLFVEQHKHYLDEIIEQISEFSKRVILADANLDKVLSAYNKHRDKPIREQAENIIHLFTLTNLGAPAAFKYFDTTIDRKQYRSTKEVLDATLIHQSITGLYETRIDLSQLGGDEGADKRTADGSEFESPKKKRKV

SEQ ID NO: 355 - protein, 4 aa, synthetic construct
  REGION 1..4: note = synthetic peptide sequence
SGGS

SEQ ID NO: 356 - protein, 24 aa, synthetic construct
  REGION 1..24: note = synthetic peptide sequence
SGGSSGSETPGTSESATPESSGGS

SEQ ID NO: 357 - protein, 32 aa, synthetic construct
  REGION 1..32: note = synthetic polypeptide sequence
SGGSSGGSSGSETPGTSESATPESSGGSSGGS

SEQ ID NO: 358 - protein, 104 aa, synthetic construct
  REGION 1..104: note = synthetic polypeptide sequence
GGSGGSPGSPAGSPTSTEEGTSESATPESGPGTSTEPSEGSAPGSPAGSPTSTEEGTSTEPSEGSAPGTSTEPSEGSAPGTSESATPESGPGSEPATSGGSGGS

SEQ ID NO: 359 - protein, 24 aa, synthetic construct
  REGION 1..24: note = synthetic peptide sequence
SGGSSGGSSGSETPGTSESATPES

SEQ ID NO: 360 - protein, 40 aa, synthetic construct
  REGION 1..40: note = synthetic polypeptide sequence
SGGSSGGSSGSETPGTSESATPESSGGSSGGSSGGSSGGS

SEQ ID NO: 361 - protein, 64 aa, synthetic construct
  REGION 1..64: note = synthetic polypeptide sequence
SGGSSGGSSGSETPGTSESATPESSGGSSGGSSGGSSGGSSGSETPGTSESATPESSGGSSGGS

SEQ ID NO: 362 - protein, 92 aa, synthetic construct
  REGION 1..92: note = synthetic polypeptide sequence
PGSPAGSPTSTEEGTSESATPESGPGTSTEPSEGSAPGSPAGSPTSTEEGTSTEPSEGSAPGTSTEPSEGSAPGTSESATPESGPGSEPATS

SEQ ID NO: 363 - protein, 5 aa, synthetic construct
  REGION 1..5: note = synthetic peptide sequence
PAPAP

SEQ ID NO: 364 - protein, 6 aa, synthetic construct
  REGION 1..6: note = synthetic peptide sequence
PAPAPA

SEQ ID NO: 365 - protein, 7 aa, synthetic construct
  REGION 1..7: note = synthetic peptide sequence
PAPAPAP

SEQ ID NO: 366 - protein, 8 aa, synthetic construct
  REGION 1..8: note = synthetic peptide sequence
PAPAPAPA

SEQ ID NO: 367 - protein, 9 aa, synthetic construct
  REGION 1..9: note = synthetic peptide sequence
PAPAPAPAP

SEQ ID NO: 368 - protein, 15 aa, synthetic construct
  REGION 1..15: note = synthetic peptide sequence
PAPAPAPAPAPAPAP

SEQ ID NO: 369 - protein, 21 aa, synthetic construct
  REGION 1..21: note = synthetic peptide sequence
PAPAPAPAPAPAPAPAPAPAP

SEQ ID NO: 370 - DNA, 306 bp, synthetic construct
  misc_feature 1..306: note = DnaE Intein-N polynucleotide sequence
  source 1..306: mol_type = other DNA
tgcctgtcatacgaaaccgagatactgacagtagaatatggccttctgccaatcgggaagattgtggagaaacggatagaatgcacagtttactctgtcgataacaatggtaacatttatactcagccagttgcccagtggcacgaccggggagagcaggaagtattcgaatactgtctggaggatggaagtctcattagggccactaaggaccacaaatttatgacagtcgatggccagatgctgcctatagacgaaatctttgagcgagagttggacctcatgcgagttgacaaccttcctaat

SEQ ID NO: 371 - protein, 102 aa, synthetic construct
  REGION 1..102: note = DnaE Intein-N polypeptide sequence
CLSYETEILTVEYGLLPIGKIVEKRIECTVYSVDNNGNIYTQPVAQWHDRGEQEVFEYCLEDGSLIRATKDHKFMTVDGQMLPIDEIFERELDLMRVDNLPN

SEQ ID NO: 372 - DNA, 108 bp, synthetic construct
  misc_feature 1..108: note = DnaE Intein-C polynucleotide sequence
  source 1..108: mol_type = other DNA
atgatcaagatagctacaaggaagtatcttggcaaacaaaacgtttatgatattggagtcgaaagagatcacaactttgctctgaagaacggattcatagcttctaat

SEQ ID NO: 373 - protein, 36 aa, synthetic construct
  REGION 1..36: note = DnaE Intein-C polypeptide sequence
MIKIATRKYLGKQNVYDIGVERDHNFALKNGFIASN

SEQ ID NO: 374 - DNA, 303 bp, synthetic construct
  misc_feature 1..303: note = Cfa-N polynucleotide sequence
  source 1..303: mol_type = other DNA
tgcctgtcttatgataccgagatacttaccgttgaatatggcttcttgcctattggaaagattgtcgaagagagaattgaatgcacagtatatactgtagacaagaatggtttcgtttacacacagcccattgctcaatggcacaatcgcggcgaacaagaagtatttgagtactgtctcgaggatggaagcatcatacgagcaactaaagatcataaattcatgaccactgacgggcagatgttgccaatagatgagatattcgagcggggcttggatctcaaacaagtggatggattgcca

SEQ ID NO: 375 - protein, 101 aa, synthetic construct
  REGION 1..101: note = Cfa-N polypeptide sequence
CLSYDTEILTVEYGFLPIGKIVEERIECTVYTVDKNGFVYTQPIAQWHNRGEQEVFEYCLEDGSIIRATKDHKFMTTDGQMLPIDEIFERGLDLKQVDGLP

SEQ ID NO: 376 - DNA, 159 bp, synthetic construct
  misc_feature 1..159: note = Cfa-C polynucleotide sequence
  source 1..159: mol_type = other DNA
atgaagaggactgccgatggatcagagtttgaatctcccaagaagaagaggaaagtaaagataatatctcgaaaaagtcttggtacccaaaatgtctatgatattggagtggagaaagatcacaacttccttctcaagaacggtctcgtagccagcaac

SEQ ID NO: 377 - protein, 53 aa, synthetic construct
  REGION 1..53: note = Cfa-C polypeptide sequence
MKRTADGSEFESPKKKRKVKIISRKSLGTQNVYDIGVEKDHNFLLKNGLVASN

SEQ ID NO: 378 - protein, 1081 aa, Neisseria meningitidis
  REGION 1..1081: note = MISC_FEATURE - Nme3Cas9; WP_002217928.1 type II CRISPR RNA-guided endonuclease Cas9 [Neisseria meningitidis]
  REGION 1..1081: note = MISC_FEATURE - NCBI Reference: WP_002217928.1; type II CRISPR RNA-guided endonuclease Cas9; Nme3Cas9 polypeptide sequence
MAAFKPNPINYILGLDIGIASVGWAMVEIDEEENPIRLIDLGVRVFERAEVPKTGDSLAMARRLARSVRRLTRRRAHRLLRARRLLKREGVLQAADFDENGLIKSLPNTPWQLRAAALDRKLTPLEWSAVLLHLIKHRGYLSQRKNEGETADKELGALLKGVADNAHALQTGDFRTPAELALNKFEKECGHIRNQRGDYSHTFSRKDLQAELNLLFEKQKEFGNPHVSGGLKEGIETLLMTQRPALSGDAVQKMLGHCTFEPAEPKAAKNTYTAERFIWLTKLNNLRILEQGSERPLTDTERATLMDEPYRKSKLTYAQARKLLSLEDTAFFKGLRYGKDNAEASTLMEMKAYHTISRALEKEGLKDKKSPLNLSPELQDEIGTAFSLFKTDEDITGRLKDRIQPEILEALLKHISFDKFVQISLKALRRIVPLMEQGKRYDEACAEIYGDHYGKKNTEEKIYLPPIPADEIRNPVVLRALSQARKVINGVVRRYGSPARIHIETAREVGKSFKDRKEIEKRQEENRKDREKAAAKFREYFPNFVGEPKSKDILKLRLYEQQHGKCLYSGKEINLGRLNEKGYVEIDHALPFSRTWDDSFNNKVLVLGSENQNKGNQTPYEYFNGKDNSREWQEFKARVETSRFPRSKKQRILLQKFDEDGFKERNLNDTRYVNRFLCQFVADRMRLTGKGKKRVFASNGQITNLLRGFWGLRKVRAENDRHHALDAVVVACSTVAMQQKITRFVRYKEMNAFDGKTIDKETGEVLHQKTHFPQPWEFFAQEVMIRVFGKPDGKPEFEEADTPEKLRTLLAEKLSSRPEAVHEYVTPLFVSRAPNRKMSGQGHMETVKSAKRLDEGVSVLRVPLTQLKLKDLEKMVNREREPKLYEALKARLEAHKDDPAKAFAEPFYKYDKAGNRTQQVKAVRVEQVQKTGVWVRNHNGIADNATMVRVDVFEKGDKYYLVPIYSWQVAKGILPDRAVVAYADEEDWTVIDESFRFKFVLYSNDLIKVQLKKDSFLGYFSGLDRATGAISLREHDLEKSKGKDGMHRIGVKTALSFQKYQIDEMGKEIRPCRLKKRPPVR

SEQ ID NO: 379 - RNA, 66 nt, synthetic construct
  misc_feature 1..66: note = Telomerase Ku Binding Motif oligonucleotide sequence
  source 1..66: mol_type = other RNA
ttcttgtcgtacttatagatcgctacgttatttcaattttgaaaatctgagtcctgggagtgcgga

SEQ ID NO: 380 - protein, 1094 aa, synthetic construct
  REGION 1..1094: note = Telomerase Ku Heterodimer polypeptide sequence
MSGWESYYKTEGDEEAEEEQEENLEASGDYKYSGRDSLIFLVDASKAMFESQSEDELTPFDMSIQCIQSVYISKIISSDRDLLAVVFYGTEKDKNSVNFKNIYVLQELDNPGAKRILELDQFKGQQGQKRFQDMMGHGSDYSLSEVLWVCANLFSDVQFKMSHKRIMLFTNEDNPHGNDSAKASRARTKAGDLRDTGIFLDLMHLKKPGGFDISLFYRDIISIAEDEDLRVHFEESSKLEDLLRKVRAKETRKRALSRLKLKLNKDIVISVGIYNLVQKALKPPPIKLYRETNEPVKTKTRTFNTSTGGLLLPSDTKRSQIYGSRQIILEKEETEELKRFDDPGLMLMGFKPLVLLKKHHYLRPSLFVYPEESLVIGSSTLFSALLIKCLEKEVAALCRYTPRRNIPPYFVALVPQEEELDDQKIQVTPPGFQLVFLPFADDKRKMPFTEKIMATPEQVGKMKAIVEKLRFTYRSDSFENPVLQQHFRNLEALALDLMEPEQAVDLTLPKVEAMNKRLGSLVDEFKELVYPPDYNPEGKVTKRKHDNEGSGSKRPKVEYSEEELKTHISKGTLGKFTVPMLKEACRAYGLKSGLKKQELLEALTKHFQDMVRSGNKAAVVLCMDVGFTMSNSIPGIESPFEQAKKVITMFVQRQVFAENKDEIALVLFGTDGTDNPLSGGDQYQNITVHRHLMLPDFDLLEDIESKIQPGSQQADFLDALIVSMDVIQHETIGKKFEKRHIEIFTDLSSRFSKSQLDIIIHSLKKCDISERHSIHWPCRLTIGSNLSIRIAAYKSILQERVKKTWTVVDAKTLKKEDIQKETVYCLNDDDETEVLKEDIIQGFRYGSDIVPFSKVDEEQMKYKSEGKCFSVLGFCKSSQVQRRFFMGNQVLKVFAARDDEAAAVALSSLIHALDDLDMVAIVRYAYDKRANPQVGVAFPHIKHNYECLVYVQLPFMEDLRQYMFSSLKNSKKYAPTEAQLNAVDALIDSMSLAKKDEKTDTLEDLFPTTKIPNPRFQRLFQCLLHRALHPREPLPPIQQHIWNMLNPPAEVTTKSQIPLSKIKTLFPLIEAKKKDQVTAQEIFQDNHEDGPTAK

SEQ ID NO: 381 - RNA, 10 nt, synthetic construct
  misc_feature 1..10: note = Telomerase Sm7 consensus site(single stranded) oligonucleotide sequence
  source 1..10: mol_type = other RNA
aatttttgga

SEQ ID NO: 382 - protein, 83 aa, synthetic construct
  REGION 1..83: note = MS2 coat protein polypeptide sequence
GSVIDVSSQRVNVQRPLDALGNSLNSPVIIKLKGDREFRGVLKSFDLHMNLVLNDAEELEDGEVTRRLGTVLIRGDNIVYISP

SEQ ID NO: 383 - RNA, 26 nt, synthetic construct
  misc_feature 1..26: note = PP7 phage operator stem loop oligonucleotide sequence
  source 1..26: mol_type = other RNA
ataaggagtttatatggaaaccctta

SEQ ID NO: 384 - protein, 128 aa, synthetic construct
  REGION 1..128: note = PP7 coat protein (PCP)polypeptide sequence
MSKTIVLSVGEATRTLTEIQSTADRQIFEEKVGPLVGRLRLTASLRQNGAKTAYRVNLKLDQADVVDCSTSVCGELPKVRYTQVWSHDVTIVANSTEASRKSLYDLTKSLVATSQVEDLVVNLVPLGR

SEQ ID NO: 385 - RNA, 19 nt, synthetic construct
  misc_feature 1..19: note = SfMu Com stem loop oligonucleotide sequence
  source 1..19: mol_type = other RNA
ctgaatgcctgcgagcatc

SEQ ID NO: 386 - protein, 62 aa, synthetic construct
  REGION 1..62: note = SfMu Com binding protein polypeptide sequence
MKSIRCKNCNKLLFKADSFDHIEIRCPRCKRHIIMLNACEHPTEKHCGKREKITHSDETVRY

SEQ ID NO: 387 - protein, 47 aa, synthetic construct
  REGION 1..47: note = leucine zipper polypeptide sequence
LEIRAAFLRQRNTALRTEVAELEQEVQRLENEVSQYETRYGPLGGGK

SEQ ID NO: 388 - protein, 47 aa, synthetic construct
  REGION 1..47: note = leucine zipper polypeptide sequence
LEIEAAFLERENTALETRVAELRQRVQRLRNRVSQYRTRYGPLGGGK

SEQ ID NO: 389 - DNA, 303 bp, synthetic construct
  source 1..303: mol_type = other DNA
tgcctgagctacgataccgagatcctgaccgtggaatacggcttcctgcctatcggcaagatcgtcgaggaacggatcgagtgcacagtgtacaccgtggataagaatggcttcgtgtacacccagcctatcgctcagtggcacaacagaggcgagcaagaggtgttcgagtactgcctggaagatggcagcatcatccgggccaccaaggaccacaagtttatgaccaccgacggccagatgctgcccatcgacgagatctttgagagaggcctggacctgaaacaggtggacggactgcct

SEQ ID NO: 390 - protein, 101 aa, synthetic construct; identical to SEQ ID NO: 375

SEQ ID NO: 391 - DNA, 264 bp, synthetic construct
  source 1..264: mol_type = other DNA
tgtctggacctcaagacccaagtgcagacacctcagggcatgaaagagattagcaatatccaggtgggcgacctggtcctgagcaacaccggctacaacgaggtgctgaacgtgttccctaagtccaagaagaaatcttataagatcaccctggaagatggcaaggaaatcatctgcagcgaggaacacctgttccccacccagaccggcgagatgaacatcagcggcggactgaaggagggcatgtgcctgtacgtgaaggag

SEQ ID NO: 392 - protein, 88 aa, synthetic construct
CLDLKTQVQTPQGMKEISNIQVGDLVLSNTGYNEVLNVFPKSKKKSYKITLEDGKEIICSEEHLFPTQTGEMNISGGLKEGMCLYVKE

SEQ ID NO: 393 - DNA, 267 bp, synthetic construct
  source 1..267: mol_type = other DNA
tgcctgagcctggacaccatggtggtgacaaacggcaaggccatcgagatcagagatgtgaaggtgggagattggctggaaagcgaatgtggcccagtgcaggttacagaggtgctgcctatcatcaagcagcctgtctttgagattgtgctgaaaagcggaaaaaagatccgggtgtccgctaatcacaagttccccaccaaggacggcctcaagaccatcaacagcggcctgaaggtgggcgacttcctgagaagcagagccaag

SEQ ID NO: 394 - protein, 89 aa, synthetic construct
CLSLDTMVVTNGKAIEIRDVKVGDWLESECGPVQVTEVLPIIKQPVFEIVLKSGKKIRVSANHKFPTKDGLKTINSGLKVGDFLRSRAK

SEQ ID NO: 395 - DNA, 303 bp, synthetic construct
  source 1..303: mol_type = other DNA
tgttttgtgcctggcaccctggtgaacacagagaatggcctgaagaaaatcgaggaaatcaaggtgggcgacaaggtgttcagccatacaggcaagctgcaggaggtggtggacaccctgatcttcgaccgggacgaggaaatcatctctatcaacggcattgattgcaccaagaaccacgagttctacgtgatcgataaggaaaacgctaatagagtgaacgaggacaacatccacctcttcgccagatgggtccacgccgaggaactggatatgaaaaagcacctgctgatcgagctggaa

SEQ ID NO: 396 - protein, 101 aa, synthetic construct
CFVPGTLVNTENGLKKIEEIKVGDKVFSHTGKLQEVVDTLIFDRDEEIISINGIDCTKNHEFYVIDKENANRVNEDNIHLFARWVHAEELDMKKHLLIELE

SEQ ID NO: 397 - DNA, 315 bp, synthetic construct
  source 1..315: mol_type = other DNA
tgcctggtgggctctagcgagattatcacaagaaactacggcaagaccaccatcaaggaagtggtcgagatcttcgacaacgacaagaatatccaggtgctggccttcaacacccacaccgataatatcgagtgggcccctatcaaggccgctcagctgaccagacctaacgccgagctggttgaactggaaatcgacaccctgcacggcgtgaaaacaatccggtgcacccctgaccaccccgtgtacaccaagaacagaggctacgtgcgggccgacgagctgacagatgatgacgagctcgtggtggctatc

SEQ ID NO: 398 - protein, 105 aa, synthetic construct
CLVGSSEIITRNYGKTTIKEVVEIFDNDKNIQVLAFNTHTDNIEWAPIKAAQLTRPNAELVELEIDTLHGVKTIRCTPDHPVYTKNRGYVRADELTDDDELVVAI

SEQ ID NO: 399 - DNA, 306 bp, synthetic construct
  source 1..306: mol_type = other DNA
tgcctgagctacgagacagagatcctgaccgtggaatatggcctgctgccaatcggaaagatcgtggaaaagcggatcgagtgcaccgtctacagcgtggacaacaacggaaatatctatacacagcctgtggcccaatggcacgaccggggcgaacaggaggtgtttgagtactgcctggaagatggttctctgattagagccaccaaggaccacaagttcatgaccgtcgacggccagatgctgcccatcgacgaaatcttcgagcgggaactcgacctgatgagagtggataacctgcccaat

SEQ ID NO: 400 - protein, 102 aa, synthetic construct; identical to SEQ ID NO: 371

SEQ ID NO: 401 - protein, 101 aa, synthetic construct; identical to SEQ ID NO: 375

SEQ ID NO: 402 - protein, 102 aa, synthetic construct; identical to SEQ ID NO: 371

SEQ ID NO: 403 - DNA, 279 bp, synthetic construct
  source 1..279: mol_type = other DNA
acaagaagcggatactgtctggacctcaagacccaagtgcagacacctcagggcatgaaagagattagcaatatccaggtgggcgacctggtcctgagcaacaccggctacaacgaggtgctgaacgtgttccctaagtccaagaagaaatcttataagatcaccctggaagatggcaaggaaatcatctgcagcgaggaacacctgttccccacccagaccggcgagatgaacatcagcggcggactgaaggagggcatgtgcctgtacgtgaaggag

SEQ ID NO: 404 - protein, 93 aa, synthetic construct
TRSGYCLDLKTQVQTPQGMKEISNIQVGDLVLSNTGYNEVLNVFPKSKKKSYKITLEDGKEIICSEEHLFPTQTGEMNISGGLKEGMCLYVKE

SEQ ID NO: 405 - DNA, 282 bp, synthetic construct
  source 1..282: mol_type = other DNA
tctcagctgaaccggtgcctgagcctggacaccatggtggtgacaaacggcaaggccatcgagatcagagatgtgaaggtgggagattggctggaaagcgaatgtggcccagtgcaggttacagaggtgctgcctatcatcaagcagcctgtctttgagattgtgctgaaaagcggaaaaaagatccgggtgtccgctaatcacaagttccccaccaaggacggcctcaagaccatcaacagcggcctgaaggtgggcgacttcctgagaagcagagccaag

SEQ ID NO: 406 - protein, 94 aa, synthetic construct
SQLNRCLSLDTMVVTNGKAIEIRDVKVGDWLESECGPVQVTEVLPIIKQPVFEIVLKSGKKIRVSANHKFPTKDGLKTINSGLKVGDFLRSRAK

SEQ ID NO: 407 - DNA, 318 bp, synthetic construct
  source 1..318: mol_type = other DNA
ggcatcggcggaggatgttttgtgcctggcaccctggtgaacacagagaatggcctgaagaaaatcgaggaaatcaaggtgggcgacaaggtgttcagccatacaggcaagctgcaggaggtggtggacaccctgatcttcgaccgggacgaggaaatcatctctatcaacggcattgattgcaccaagaaccacgagttctacgtgatcgataaggaaaacgctaatagagtgaacgaggacaacatccacctcttcgccagatgggtccacgccgaggaactggatatgaaaaagcacctgctgatcgagctggaa

SEQ ID NO: 408 - protein, 106 aa, synthetic construct
GIGGGCFVPGTLVNTENGLKKIEEIKVGDKVFSHTGKLQEVVDTLIFDRDEEIISINGIDCTKNHEFYVIDKENANRVNEDNIHLFARWVHAEELDMKKHLLIELE

SEQ ID NO: 409 - DNA, 330 bp, synthetic construct
  source 1..330: mol_type = other DNA
ggaacaaacccatgttgcctggtgggctctagcgagattatcacaagaaactacggcaagaccaccatcaaggaagtggtcgagatcttcgacaacgacaagaatatccaggtgctggccttcaacacccacaccgataatatcgagtgggcccctatcaaggccgctcagctgaccagacctaacgccgagctggttgaactggaaatcgacaccctgcacggcgtgaaaacaatccggtgcacccctgaccaccccgtgtacaccaagaacagaggctacgtgcgggccgacgagctgacagatgatgacgagctcgtggtggctatc

SEQ ID NO: 410 - protein, 110 aa, synthetic construct
GTNPCCLVGSSEIITRNYGKTTIKEVVEIFDNDKNIQVLAFNTHTDNIEWAPIKAAQLTRPNAELVELEIDTLHGVKTIRCTPDHPVYTKNRGYVRADELTDDDELVVAI

SEQ ID NO: 411 - DNA, 105 bp, synthetic construct
  source 1..105: mol_type = other DNA
gtcaagatcatcagcagaaagagcctgggcacccagaacgtgtacgatatcggagtgggcgagccccacaactttctgctcaagaatggcctggtggccagcaac

SEQ ID NO: 412 - protein, 35 aa, synthetic construct
VKIISRKSLGTQNVYDIGVGEPHNFLLKNGLVASN

SEQ ID NO: 413 - DNA, 114 bp, synthetic construct
  source 1..114: mol_type = other DNA
atgatgctgaaaaagatcctgaagatcgaggaactggatgagagagagctgatcgacatcgaagtgtctggcaatcacctgttctacgccaacgacatcctgacccacaacagc

SEQ ID NO: 414 - protein, 38 aa, synthetic construct
MMLKKILKIEELDERELIDIEVSGNHLFYANDILTHNS

SEQ ID NO: 415 - DNA, 138 bp, synthetic construct
  source 1..138: mol_type = other DNA
atgtgcgaaatcttcgagaacgagattgattgggacgaaatcgcctctatcgagtacgtgggcgtggaagagacaatcgacatcaacgtgaccaacgacagactgtttttcgccaatggcatcctgacccacaacagc

SEQ ID NO: 416 - protein, 46 aa, synthetic construct
MCEIFENEIDWDEIASIEYVGVEETIDINVTNDRLFFANGILTHNS

SEQ ID NO: 417 - DNA, 123 bp, synthetic construct
  source 1..123: mol_type = other DNA
atgaaattcaagctgaaggaaatcaccagcatcgagacaaagcactacaagggcaaggtgcacgatctgaccgtgaaccaggaccacagctacaacgtcagaggcaccgtggtgcataattct

SEQ ID NO: 418 - protein, 41 aa, synthetic construct
MKFKLKEITSIETKHYKGKVHDLTVNQDHSYNVRGTVVHNS

SEQ ID NO: 419 - DNA, 123 bp, synthetic construct
  source 1..123: mol_type = other DNA
atggaagccaagacctacatcggcaagctgaaatctagaaagatcgtgtccaacgaggatacatacgacatccagaccagcacccacaatttcttcgccaacgacatcctggtgcacaacagc

SEQ ID NO: 420 - protein, 41 aa, synthetic construct
MEAKTYIGKLKSRKIVSNEDTYDIQTSTHNFFANDILVHNS

SEQ ID NO: 421 - DNA, 108 bp, synthetic construct
  source 1..108: mol_type = other DNA
atgatcaagatcgccacaagaaagtacctgggcaagcagaacgtgtacgacatcggcgtggagagagaccacaacttcgccctgaagaacggctttatcgcctctaat

SEQ ID NO: 422 - protein, 36 aa, synthetic construct; identical to SEQ ID NO: 373

SEQ ID NO: 423 - protein, 36 aa, synthetic construct
MVKIISRKSLGTQNVYDIGVGEPHNFLLKNGLVASN

SEQ ID NO: 424 - protein, 35 aa, synthetic construct
IKIATRKYLGKQNVYDIGVERDHNFALKNGFIASN

SEQ ID NO: 425 - DNA, 88 bp, synthetic construct
  source 1..88: mol_type = other DNA; note = SaCas9 scaffold sequence
gttttagtactctgtaatgaaaattacagaatctactaaaacaaggcaaaatgccgtgtttatctcgtcaacttgttggcgagatttt

SEQ ID NO: 426 - protein, 438 aa, Homo sapiens
MVCSQSWGRSSKQWEDPSQASKVCQRLNCGVPLSLGPFLVTYTPQSSIICYGQLGSFSNCSHSRNDMCHSLGLTCLEPQKTTPPTTRPPPTTTPEPTAPPRLQLVAQSGGQHCAGVVEFYSGSLGGTISYEAQDKTQDLENFLCNNLQCGSFLKHLPETEAGRAQDPGEPREHQPLPIQWKIQNSSCTSLEHCFRKIKPQKSGRVLALLCSGFQPKVQSRLVGGSSICEGTVEVRQGAQWAALCDSSSARSSLRWEEVCREQQCGSVNSYRVLDAGDPTSRGLFCPHQKLSQCHELWERNSYCKKVFVTCQDPNPAGLAAGTVASIILALVLLVVLLVVCGPLAYKKLVKKFRQKKQRQWIGPTGMNQNMSFHRNHTATVRSHAENPTASHVDNEYSQPPRNSHLSAYPALEGALHRSSMQPDNSSDSDYDLHGAQRL

SEQ ID NO: 427 - DNA, 3376 bp, Homo sapiens
  source 1..3376: mol_type = genomic DNA
gagtcttgctgatgctcccggctgaataaaccccttccttctttaacttggtgtctgaggggttttgtctgtggcttgtcctgctacatttcttggttccctgaccaggaagcaaagtgattaacggacagttgaggcagccccttaggcagcttaggcctgccttgtggagcatccccgcggggaactctggccagcttgagcgacacggatcctcagagcgctcccaggtaggcaattgccccagtggaatgcctcgtcagagcagtgcatggcaggcccctgtggaggatcaacgcagtggctgaacacagggaaggaactggcacttggagtccggacaactgaaacttgtcgcttcctgcctcggacggctcagctggtatgacccagatttccaggcaaggctcacccgttccaactcgaagtgccagggccagctggaggtctacctcaaggacggatggcacatggtttgcagccagagctggggccggagctccaagcagtgggaggaccccagtcaagcgtcaaaagtctgccagcggctgaactgtggggtgcccttaagccttggccccttccttgtcacctacacacctcagagctcaatcatctgctacggacaactgggctccttctccaactgcagccacagcagaaatgacatgtgtcactctctgggcctgacctgcttagaaccccagaagacaacacctccaacgacaaggcccccgcccaccacaactccagagcccacagctcctcccaggctgcagctggtggcacagtctggcggccagcactgtgccggcgtggtggagttctacagcggcagcctggggggtaccatcagctatgaggcccaggacaagacccaggacctggagaacttcctctgcaacaacctccagtgtggctccttcttgaagcatctgccagagactgaggcaggcagagcccaagacccaggggagccacgggaacaccagcccttgccaatccaatggaagatccagaactcaagctgtacctccctggagcattgcttcaggaaaatcaagccccagaaaagtggccgagttcttgccctcctttgctcaggtttccagcccaaggtgcagagccgtctggtggggggcagcagcatctgtgaaggcaccgtggaggtgcgccagggggctcagtgggcagccctgtgtgacagctcttcagccaggagctcgctgcggtgggaggaggtgtgccgggagcagcagtgtggcagcgtcaactcctatcgagtgctggacgctggtgacccaacatcccgggggctcttctgtccccatcagaagctgtcccagtgccacgaactttgggagagaaattcctactgcaagaaggtgtttgtcacatgccaggatccaaaccccgcaggcctggccgcaggcacggtggcaagcatcatcctggccctggtgctcctggtggtgctgctggtcgtgtgcggcccccttgcctacaagaagctagtgaagaaattccgccagaagaagcagcgccagtggattggcccaacgggaatgaaccaaaacatgtctttccatcgcaaccacacggcaaccgtccgatcccatgctgagaaccccacagcctcccacgtggataacgaatacagccaacctcccaggaactcccacctgtcagcttatccagctctggaaggggctctgcatcgctcctccatgcagcctgacaactcctccgacagtgactatgatctgcatggggctcagaggctgtaaagaactgggatccatgagcaaaaagccgagagccagacctgtttgtcctgagaaaactgtccgctcttcacttgaaatcatgtccctatttctaccccggccagaacatggacagaggccagaagccttccggacaggcgctgctgccccgagtggcaggccagctcacactctgctgcacaacagctcggccgcccctccacttgtggaagctgtggtgggcagagccccaaaacaagcagccttccaactagagactcgggggtgtctgaagggggccccctttccctgcccgctggggagcggcgtctcagtgaaatcggctttctcctcagactctgtccctggtaaggagtgacaaggaagctcacagctgggcgagtgcattttgaatagttttttgtaagtagtgcttttcctccttcctgacaaatcgagcgctttggcctcttctgtgcagcatccacccctgcggatccctctggggaggacaggaaggggactcccggagacctctgcagccgtggtggtcagaggctgctcacctgagcacaaagacagctctgcacattcaccgcagctgccagccaggggtctgggtgggcaccaccctgacccacagcgtcaccccactccctctgtcttatgactcccctccccaaccccctcatctaaagacaccttcctttccactggctgtcaagcccacagggcaccagtgccacccagggcccggcacaaaggggcgcctagtaaaccttaaccaacttggttttttgcttcacccagcaattaaaagtcccaagctgaggtagtttcagtccatcacagttcatcttctaacccaagagtcagagatggggctggtcatgttcctttggtttgaataactcccttgacgaaaacagactcctctagtacttggagatcttggacgtacacctaatcccatggggcctcggcttccttaactgcaagtgagaagaggaggtctacccaggagcctcgggtctgatcaagggagaggccaggcgcagctcactgcggcggctccctaagaaggtgaagcaacatgggaacacatcctaagacaggtcctttctccacgccatttgatgctgtatctcctgggagcacaggcatcaatggtccaagccgcataataagtctggaagagcaaaagggagttactaggatatggggtgggctgctcccagaatctgctcagctttctgcccccaccaacaccctccaaccaggccttgccttctgagagcccccgtggccaagcccaggtcacagatcttcccccgaccatgctgggaatccagaaacagggaccccatttgtcttcccatatctggtggaggtgagggggctcctcaaaagggaactgagaggctgctcttagggagggcaaaggttcgggggcagccagtgtctcccatcagtgccttttttaataaaagctctttcatctatagtttggccaccatacagtggcctcaaagcaaccatggcctacttaaaaaccaaaccaaaaataaagagtttagttgaggagaaaaaaaaaaaaaaaaaaaaaaaaa

SEQ ID NO: 428 - protein, 8 aa, synthetic construct
DYKDDDDK

SEQ ID NO: 429 - protein, 6 aa, synthetic construct
HHHHHH

SEQ ID NO: 430 - protein, 13 aa, synthetic construct
GAPVPYPDPLEPR

SEQ ID NO: 431 - protein, 124 aa, synthetic construct
QVQLVESGGGLVQPGGSLRLSCAASGRTFINYAAGWFRQAPGKEREFVARISRSGGRTDYADSVKGRFTISRDNAKSTVYLQMNSLRPEDTAVYYCAEATVWEFTDGADQYDYWGQGTQVTVSS

SEQ ID NO: 432 - protein, 126 aa, synthetic construct
EVQLVESGGGLVQAGGSLRLSCAASGRTFGSYTMGWFRQAPGKEREFVAAISWSAGRTYYADSMKGRFTISRDNAKNTVYLQMNSLKPEDTAVYYCAADPWTSDSDYDRLTMYDYWGQGTQVTVSS

SEQ ID NO: 433 - protein, 126 aa, synthetic construct
EVQLVESGGGLVQAGGSLRLSCAASGRTFGTYTMGWFRQAPGKEREFVAAISWSAGRTYYADSMKGRFTISRDNAKNTVYLQMNSLKPEDTAVYYCAADPWTSDSDYDRLTMYDYWGQGTQVTVSS

SEQ ID NO: 434 - protein, 126 aa, synthetic construct
QVQLQESGGGLVQAGGSLRLSCAASGRTFGSYTMGWFRQAPGKEREFVAAISWSAGRTYYADSMKGRFTISRDNAKNTVYLQMNSLKPEDTAVYYCAADPWTSDSDYDRLTMYDYWGQGTQVTVSS

SEQ ID NO: 435 - protein, 126 aa, synthetic construct
QVQLQESGGGLVQAGGSLRLSCAASGRTFGTYTMGWFRQAPGKEREFVAAISWSAGRTYYADSMKGRFTISRDNAKNTVYLQMNSLKPEDTAVYYCAADPWTSDSDYDRLTMYDYWGQGTQVTVSS

SEQ ID NO: 436 - protein, 126 aa, synthetic construct
QVQLQESGGGLVQAGGSLRLSCAASGRTFGTYTMGWFRQAPGKGREFVAAISWSAGRTYYADSMKGRFTISRDNAKNTVYLQMNSLKPEDTAVYYCAADPWTSDSDYDRLTMYDYWGQGTQVTVSS

SEQ ID NO: 437 - protein, 126 aa, synthetic construct
QVQLVESGGGLVQAGGSLRLSCAASGRTFGSYTMGWFRQAPGKEREFVAAISWSAGRTYYADSMKGRFTISRDNAKNTVYLQMNSLKPEDTAVYYCAADPWTSDSDYDRLTMYDYWGQGTQVTVSS

SEQ ID NO: 438 - protein, 126 aa, synthetic construct
QVQLVESGGGLVQAGGSLRLSCAASGRTFGTYTMGWFRQAPGKEREFVAAISWSAGRTYYADSMKGRFTISRDNAKNTVYLQMNSLKPEDTAVYYCAADPWTSDSDYDRLTMYDYWGQGTQVTVSS

SEQ ID NO: 439 - protein, 126 aa, synthetic construct
QVQLVESGGGLVQAGGSLRLSCAASGRTFGTYTMGWFRQAPGREREFVAAISWSAGRTYYADSMKGRFTISRDNAKNTVYLQMNSLKPEDTAVYYCAADPWTSDSDYDRLTMYDYWGQGTQVTVSS

SEQ ID NO: 440 - protein, 126 aa, synthetic construct
EVQLVESGGGLVQAGGSLRLSCAASGGTVSSYAMGWFRQAPGKEREFVAVISWSGGRTYYADSVKGRFTISRDNAKNTVNLQMNSLKPEDTAVYYCAADPWTSDSDYERLTMYDYWGQGTQVTVSS

SEQ ID NO: 441 - protein, 126 aa, synthetic construct
EVQLVESGGGLVQAGGSRRLSCAASGGTVSSYAMGWFRQAPGKEREFVAVISWSGGRTYYADSVKGRFTISRDNAKNTVYLQMNSLKPEDTAVYYCAADPWTSDSDYERLTMYDYWGQGTQVTVSS

SEQ ID NO: 442 - protein, 126 aa, synthetic construct
QVQLVESGGGLVQAGGSLRLSCAASGGTVSSYAMGWFRQAPGKEREFVAVISWSGGRTYYADSVKGRFTISRDNAKNTVNLQMNSLKPEDTAVYYCAADPWTSDSDYERLTMYDYWGQGTQVTVSS

SEQ ID NO: 443 - protein, 126 aa, synthetic construct
QVQLVESGGGLVQAGGSLRLSCAASGGTVSSYAMGWFRQAPGKEREFVAVISWSGGRTYYADSVKGRFTISRDNAKNTVYLQMNSLKPEDTAVYYCAADPWTSDSDYERLTMYDYWGQGTQVTVSS

SEQ ID NO: 444 - protein, 125 aa, synthetic construct
EVQLVESGGGLVQAGASLRLSCAASGRTTYNMGWFRHAPGKDREFVAAIDLYGRATRYANSVKGRFTISRDNAKNTVYLQMNSLKPEDTAVYYCAADTSLPLGVLTESQRLYGAWGQGTQVTVSS

SEQ ID NO: 445 - protein, 125 aa, synthetic construct
QVQLQESGGGLVQAGASLRLSCAASGRATYNMGWFRHAPGEDREFVAAINLEGYATRYANSVKGRFTISRDNAKNTVYLQMNSLKPEDTAVYYCAADTSLPLGVLTESQRLYGAWGQGTQVTVSS

SEQ ID NO: 446 - protein, 125 aa, synthetic construct
QVQLQESGGGLVQAGASLRLSCAASGRTTYNMGWFRHAPGKDREFVAAIDLYGRATRYANSVKGRFTISRDNAKNTVYLQMNSLKPEDTAVYYCAADTSLPLGVLTESQRLYGAWGQGTQVTVSS

SEQ ID NO: 447 - protein, 125 aa, synthetic construct
QVQLQESGGGLVQAGASLRLSCAASGRTTYNMGWFRHAPGKDREFVAAIDLYGRATRYANSVRGRFTISRDNAKNTVYLQMNSLKPEDTAVYYCAADTSLPLGVLTESQRLYGAWGQGTQVTVSS

SEQ ID NO: 448 - protein, 125 aa, synthetic construct
QVQLVESGGGLVQAGASLRLSCAASGRTTYNMGWFRHAPGKDREFVAAIDLYGRATRYANSVKGRFTISRDNAKNTVYLQMNSLKPEDTAVYYCAADTSLPLGVLTESQRLYGAWGQGTQVTVSS

SEQ ID NO: 449 - protein, 125 aa, synthetic construct
QVQLVESGGGLVQAGASLRLSCAASGRTTYNMGWFRHAPGKDREFVAAIDLYGRATRYANSVKGRFTISRDNAKNTVYLQMNSLKPEDTAVYYCAADTSLPLGVLTKSQRMYGAWGQGTQVTVSS

SEQ ID NO: 450 - protein, 136 aa, synthetic construct
QVQLQESGGGSVQAGGSLRLSCAASGRAFSAYAMGWFRQAPGKEREFVAAINWNGDTALRWNGFATRYADSVKGRFIISRVNAKNTVNLQMNSLKPEDTAVYYCAADTVVSGSYYLAARAEDYEYWGQGTQVSVSS

SEQ ID NO: 451 - protein, 136 aa, synthetic construct
QVQLQESGGGSVQAGGSLRLSCAASGRAFSAYAMGWFRQAPGKEREFVAAINWNGDTALRWNGFATRYADSVKGRFTISRVIAKNTVNLQMNSLKPEDTAVYYCAADTVVSGSYYLAARAEDYEYWGQGTQVTVSS

SEQ ID NO: 452 - protein, 136 aa, synthetic construct
QVQLQESGGGSVQAGGSLRLSCAASGRAFSAYAMGWFRQAPGKEREFVAAINWNGDTALRWNGFATRYADSVKGRFTISRVNAKNTVNLQMNSLKPEDTAVYYCAADTVVSGSYYLAARAEDYEYWGQGTQVSVSS

SEQ ID NO: 453 - protein, 136 aa, synthetic construct
QVQLQESGGGSVQAGGSLRLSCAASGRAFSAYAMGWFRQAPGKEREFVAAINWNGDTALRWNGFATRYADSVKGRFTISRVNAKNTVNLQMNSLKPEDTAVYYCAADTVVSGSYYLAARAEDYEYWGQGTQVTVSS

SEQ ID NO: 454 - protein, 124 aa, synthetic construct
EVQLVESGGGLVQAGGSLRLSCAASGPAFSSSGMGWFRQAPGKARDFVASMDWSGGSTYYGDSVKGRFTVSRDNAKNTVHLQMNSLRPEDTAVYYCARGTSGVAAVNLRGFFSWGPGTQVTVSS

SEQ ID NO: 455 - protein, 124 aa, synthetic construct
QVQLQESGGGLVQAGGSLRLSCAASGPAFSSSGMGWFRQAPGKARDFVASIDWSGGSTYYGDSVKGRFTVSRDNAKNTVHLQMNSLRPEDTAVYYCARGTSGVAAVNLRGFFSWGPGTQVTVSS

SEQ ID NO: 456 - protein, 124 aa, synthetic construct
QVQLVESGGGLVQAGGSLRLACAASGAAFSSSGMGWFRQAPGKARDFVASMDWSGGSTYYGDSVKGRFTVSRDNAKNTVHLQMNSLRPEDTAVYYCARGTSGVAAVNLRGFFSWGPGTQVTVSS

SEQ ID NO: 457 - protein, 124 aa, synthetic construct
QVQLVESGGGLVQAGGSLRLSCAASGPAFSSSGMGWFRQAPGKARDFVASIDWGGGSTYYGDSVKGRFTVSRDNAKNAVHLQMNSLRPEDTAVYYCARGTSGVAAVNLRGFFSWGPGTQVTVSS

SEQ ID NO: 458 - protein, 124 aa, synthetic construct
QVQLVESGGGLVQAGGSLRLSCAASGPAFSSSGMGWFRQAPGKARDFVASIDWSGGSTYYGDSVKGRFTVSRDNAKNTVHLQMNSLRPEDTAVYYCARGTSGVAAVNLRGFFSWGPGTQVTVSS

SEQ ID NO: 459 - protein, 124 aa, synthetic construct
QVQLVESGGGLVQAGGSLRLSCAASGPAFSSSGMGWFRQAPGKARDFVASIDWSGKSTYYGDSVKGRFTVSRDNAKNTVHLQMNSLRPEDTAVYYCARGTSGVAAVNLRGFFSWGPGTQVTVSS

SEQ ID NO: 460 - protein, 124 aa, synthetic construct
QVQLVESGGGLVQAGGSLRLSCAASGPAFSSSGMGWFRQAPGKARDFVASINWSGGSAYYGDSVKGRFTVSRDNAKNTVHLQMNSLRPEDTAVYYCARGTSGVAAVNLRGFFSWGPGTQVTVSS

SEQ ID NO: 461 - protein, 124 aa, synthetic construct
QVQLVESGGGLVQAGGSLRLSCAASGPAFSSSGMGWFRQAPGKARDFVASMDWSGGSTYYGDSVKGRFTVSRDNAKNTVHLQMNSLRPEDTAVYYCARGTSGVAAVNLRGFFSWGPGTQVTVSS

SEQ ID NO: 462 - protein, 124 aa, synthetic construct
QVQLVESGGGLVQAGGSLRLSCAASGPAFSSSGMGWFRQAPGKAREFVASMDWTGGSTYYGDSVKGRFTVSRDNAKMTVHLQMNSLRPEDTAVYYCARGTSGVAAVNLRGFFSWGPGTQVTVSS

SEQ ID NO: 463 - protein, 111 aa, synthetic construct
QLQLVESGGGLVQPGGSLRLSCAASGSDFLVDATTWFRQAPGNQREFVAIMDIGGVTEYADSVKGRFTISRDHTKNTVYLQMNSLKVEDTAVYYCNTRGLWGQGTLVTVSS

SEQ ID NO: 464 - protein, 115 aa, synthetic construct
QVQLQESGGGLVQAGGSLRLSCATSGITSSINVIGWYRQAPGKQRELVALVNSGGQTHYADSVKGRFTISRDNAKNTVFLQMNSLKPEDTAEYYCHGRYGIDNYWGEGTQVTVSS

SEQ ID NO: 465 - protein, 113 aa, synthetic construct
EVQLVESGGGLVQPGGSLRLSCAASGFPFSSSFMSWVRQAPGKGLEWVSTIYSDGSTYYADSVKGRFTISRDNAKKTAYLQMNSLKAEDTAVYYCATVTGSIRGQGTQVTVSS

SEQ ID NO: 466 - protein, 113 aa, synthetic construct
QVQLVESGGGLVQPGGSLRLSCAASGFNFSSSFMSWVRQAPGKEVEWVSTIYSDGSTYYADSMKGRFTISRDNAKNTVYLQMSNLKAEDTAVYYCATVTGSIRGQGTQVTVSS

SEQ ID NO: 467 - protein, 119 aa, synthetic construct
QVQLVESGGGLVQPGGSVRLSCATSGSIFSTNVMGWYRQAPGKEREFVALIRGGGSTHYADSVKGRFIISRENAKTTVYLQMNGLKPEDTAVYYCVIWLGSPGAMSDYWGQGTQVTVSS

SEQ ID NO: 468 - protein, 119 aa, synthetic construct
EVQLVESGGGLVQPGGSLRLSCAASGSVVSTNNMGWYRQAPGKEREFVALIRTGGSTHVADSMKGRFTISRENAKNTVYLQMNSLKPEDTAVYYCVIWTGSPGALSDYWGQGTQVTVSS

SEQ ID NO: 469 - protein, 119 aa, synthetic construct
QVQLVESGGGLVQPGGSLRLSCAASGSDASTNNMAWYRQAPGKEREFVALIRTGGSTHVADSMKGRFTISRENAKNTVYLQMNSLKPEDTAVYYCVIWTGSPGALSDYWGQGTQVTVSS

SEQ ID NO: 470 - protein, 113 aa, synthetic construct
QLQLVESGGGLVQPGESLRLSCAASGFSFSRVAMNWYRQAPGKERELVATISSDGSRTNYAHSVKGRFTISRENAKNMVYLQMNSLKLEDTAVYYCNVPGNSWGQGTQVTVSS

SEQ ID NO: 471 - protein, 113 aa, synthetic construct
QLQLVESGGGLVQPGESLRLSCAASGFSFSRVGMNWYRQAPGKERELVASISSDGSRTNYAHFVKGRFTISRDNVKNMVYLQMNSLKLEDTAVYYCNVPGNSWGQGTQVTVSS

SEQ ID NO: 472 - protein, 112 aa, synthetic construct
QLQLVESGGGLVQPGESLRLSCVVSGDIFSFVGWGWYRQAPGKQREVVAQISTGGLTNYADSVKGRFAISRDNAKRTVYLQMNSLKFEDTAVYYCNVPGHPWGQGTQVTVSS

SEQ ID NO: 473 - protein, 112 aa, synthetic construct
QVQLVESGGGLVQPGESLRLSCVVSGDIFSFIGWGWYRQAPGKQRELVAQINTGGLTDYADSVKGRFTISRDNAKRTVYLQMNSLKFEDTAVYYCNFPGHSWGQGTQVTVSS

SEQ ID NO: 474 - protein, 121 aa, synthetic construct
QVQLVESGGGLVQPGGSLRLSCAASGFTFSMYSMSWVRQAPGKRLEWVSSISTGARDTAYADSVKGRFTISRDNADNTLYLHMNNLKPEDTAVYYCANGDLRYGPDGYDYRGQGTQVTVSS

SEQ ID NO: 475 - protein, 121 aa, synthetic construct
QVQLVESGGGLVQPGGSLRLSCAASGFTFSMYSMSWVRQAPGKRLEWVSSISTGARDTAYADSVKGRFTISRDNADNTLYLHMNNLKPEDTAVYYCANGDLRYGPDGYDYRGQGTQVTVVS

SEQ ID NO: 476 - protein, 121 aa, synthetic construct
QVQLVESGGGLVQPGGSLRLSCAASGFTFSMYSMSWVRQAPGKRLEWVSSISTGARDTSYADSVKGRFTISRDNADNTLYLHMNNLKPEDTAVYYCANGDLRYGPDGYDYRGQGTQVTVSS

SEQ ID NO: 477 - protein, 125 aa, synthetic construct
QVQLVESGGGLVQPGGSLRLSCVASGGTFSTYGMGWFRQAPGKEREFVAVITGSGVGTQYADSVKDRFTISRENAKNTVYLQMNTLKLEDTAVYYCVSGHRPGWAVIRADAYEYWGQGTQVTVSS

SEQ ID NO: 478 - protein, 5 aa, synthetic construct
NYAAG

SEQ ID NO: 479 - protein, 5 aa, synthetic construct
SYTMG

SEQ ID NO: 480 - protein, 5 aa, synthetic construct
TYTMG

SEQ ID NO: 481 - protein, 5 aa, synthetic construct
SYAMG

SEQ ID NO: 482 - protein, 5 aa, synthetic construct
TYNMG

SEQ ID NO: 483 - protein, 5 aa, synthetic construct
AYAMG

SEQ ID NO: 484 - protein, 5 aa, synthetic construct
SSGMG

SEQ ID NO: 485 - protein, 5 aa, synthetic construct
VDATT

SEQ ID NO: 486 - protein, 17 aa, synthetic construct
RISRSGGRTDYADSVKG

SEQ ID NO: 487 - protein, 17 aa, synthetic construct
AISWSAGRTYYADSMKG

SEQ ID NO: 488 - protein, 17 aa, synthetic construct
VISWSGGRTYYADSVKG

SEQ ID NO: 489 - protein, 17 aa, synthetic construct
AIDLYGRATRYANSVKG

SEQ ID NO: 490 - protein, 25 aa, synthetic construct
AINWNGDTALRWNGFATRYADSVKG

SEQ ID NO: 491 - protein, 17 aa, synthetic construct
SMDWSGGSTYYGDSVKG

SEQ ID NO: 492 - protein, 17 aa, synthetic construct
SIDWSGGSTYYGDSVKG

SEQ ID NO: 493 - protein, 17 aa, synthetic construct
SIDWGGGSTYYGDSVKG

SEQ ID NO: 494 - protein, 17 aa, synthetic construct
SIDWSGKSTYYGDSVKG

SEQ ID NO: 495 - protein, 17 aa, synthetic construct
SINWSGGSAYYGDSVKG

SEQ ID NO: 496 - protein, 17 aa, synthetic construct
SMDWTGGSTYYGDSVKG

SEQ ID NO: 497 - protein, 16 aa, synthetic construct
IMDIGGVTEYADSVKG

SEQ ID NO: 498 - protein, 15 aa, synthetic construct
ATVWEFTDGADQYDY

SEQ ID NO: 499 - protein, 17 aa, synthetic construct
DPWTSDSDYDRLTMYDY

SEQ ID NO: 500 - protein, 17 aa, synthetic construct
DPWTSDSDYERLTMYDY

SEQ ID NO: 501 - protein, 18 aa, synthetic construct
DTSLPLGVLTESQRLYGA

SEQ ID NO: 502 - protein, 18 aa, synthetic construct
DTSLPLGVLTKSQRMYGA

SEQ ID NO: 503 - protein, 19 aa, synthetic construct
DTVVSGSYYLAARAEDYEY

SEQ ID NO: 504 - protein, 15 aa, synthetic construct
GTSGVAAVNLRGFFS

SEQ ID NO: 505 - protein, 5 aa, synthetic construct
INVIG

SEQ ID NO: 506 - protein, 5 aa, synthetic construct
SSFMS

SEQ ID NO: 507 - protein, 5 aa, synthetic construct
TNVMG

SEQ ID NO: 508 - protein, 5 aa, synthetic construct
TNNMG

SEQ ID NO: 509 - protein, 5 aa, synthetic construct
TNNMA

SEQ ID NO: 510 - protein, 5 aa, synthetic construct
RVAMN

SEQ ID NO: 511 - protein, 5 aa, synthetic construct
RVGMN

SEQ ID NO: 512 - protein, 5 aa, synthetic construct
FVGWG

SEQ ID NO: 513 - protein, 5 aa, synthetic construct
FIGWG

SEQ ID NO: 514 - protein, 5 aa, synthetic construct
MYSMS

SEQ ID NO: 515 - protein, 5 aa, synthetic construct
TYGMG

SEQ ID NO: 516 - protein, 16 aa, synthetic construct
LVNSGGQTHYADSVKG

SEQ ID NO: 517 - protein, 16 aa, synthetic construct
TIYSDGSTYYADSVKG

SEQ ID NO: 518 - protein, 16 aa, synthetic construct
TIYSDGSTYYADSMKG

SEQ ID NO: 519 - protein, 16 aa, synthetic construct
LIRGGGSTHYADSVKG

SEQ ID NO: 520 - protein, 16 aa, synthetic construct
LIRTGGSTHVADSMKG

SEQ ID NO: 521 - skipped

SEQ ID NO: 522 - protein, 17 aa, synthetic construct
TISSDGSRTNYAHSVKG

SEQ ID NO: 523 - protein, 17 aa, synthetic construct
SISSDGSRTNYAHFVKG

SEQ ID NO: 524 - protein, 16 aa, synthetic construct
QISTGGLTNYADSVKG

SEQ ID NO: 525 - protein, 16 aa, synthetic construct
QINTGGLTDYADSVKG

SEQ ID NO: 526 - protein, 17 aa, synthetic construct
SISTGARDTAYADSVKG

SEQ ID NO: 527 - protein, 17 aa, synthetic construct
VITGSGVGTQYADSVKD

SEQ ID NO: 528 - protein, 7 aa, synthetic construct
RYGIDNY

SEQ ID NO: 529 - protein, 5 aa, synthetic construct
VTGSI

SEQ ID NO: 530 - protein, 11 aa, synthetic construct
WLGSPGAMSDY

SEQ ID NO: 531 - protein, 11 aa, synthetic construct
WTGSPGALSDY

SEQ ID NO: 532 - protein, 4 aa, synthetic construct
PGNS

SEQ ID NO: 533 - protein, 4 aa, synthetic construct
PGHP

SEQ ID NO: 534 - protein, 4 aa, synthetic construct
PGHS

SEQ ID NO: 535 - protein, 12 aa, synthetic construct
GDLRYGPDGYDY

SEQ ID NO: 536 - protein, 16 aa, synthetic construct
GHRPGWAVIRADAYEY

SEQ ID NO: 537 - protein, 30 aa, synthetic construct
QVQLVESGGGLVQPGGSLRLSCAASGRTFI

SEQ ID NO: 538 - protein, 30 aa, synthetic construct
EVQLVESGGGLVQAGGSLRLSCAASGRTFG

SEQ ID NO: 539 - protein, 14 aa, synthetic construct
WFRQAPGKEREFVA

SEQ ID NO: 540 - protein, 32 aa, synthetic construct
RFTISRDNAKSTVYLQMNSLRPEDTAVYYCAE

SEQ ID NO: 541 - protein, 32 aa, synthetic construct
RFTISRDNAKNTVYLQMNSLKPEDTAVYYCAA

SEQ ID NO: 542 - protein, 11 aa, synthetic construct
WGQGTQVTVSS

SEQ ID NO: 543 - protein, 30 aa, synthetic construct
QVQLQESGGGLVQAGGSLRLSCAASGRTFG

SEQ ID NO: 544 - protein, 30 aa, synthetic construct
EVQLVESGGGLVQAGGSLRLSCAASGGTVS

SEQ ID NO: 545 - protein, 30 aa, synthetic construct
EVQLVESGGGLVQAGGSRRLSCAASGGTVS

SEQ ID NO: 546 - protein, 30 aa, synthetic construct
QVQLVESGGGLVQAGGSLRLSCAASGGTVS

SEQ ID NO: 547 - protein, 32 aa, synthetic construct
RFTISRDNAKNTVNLQMNSLKPEDTAVYYCAA

SEQ ID NO: 548 - protein, 28 aa, synthetic construct
EVQLVESGGGLVQAGASLRLSCAASGRT

SEQ ID NO: 549 - protein, 28 aa, synthetic construct
QVQLQESGGGLVQAGASLRLSCAASGRA

SEQ ID NO: 550 - protein, 28 aa, synthetic construct
QVQLQESGGGLVQAGASLRLSCAASGRT

SEQ ID NO: 551 - protein, 28 aa, synthetic construct
QVQLVESGGGLVQAGASLRLSCAASGRT

SEQ ID NO: 552 - protein, 14 aa, synthetic construct
WFRHAPGKDREFVA

SEQ ID NO: 553 - protein, 14 aa, synthetic construct
WFRHAPGEDREFVA

SEQ ID NO: 554 - protein, 30 aa, synthetic construct
QVQLQESGGGSVQAGGSLRLSCAASGRAFS

SEQ ID NO: 555 - protein, 32 aa, synthetic construct
RFIISRVNAKNTVNLQMNSLKPEDTAVYYCAA

SEQ ID NO: 556 - protein, 32 aa, synthetic construct
RFTISRVIAKNTVNLQMNSLKPEDTAVYYCAA

SEQ ID NO: 557 - protein, 11 aa, synthetic construct
WGQGTQVSVSS

SEQ ID NO: 558 - protein, 32 aa, synthetic construct
RFTISRVNAKNTVNLQMNSLKPEDTAVYYCAA

SEQ ID NO: 559 - protein, 30 aa, synthetic construct
EVQLVESGGGLVQAGGSLRLSCAASGPAFS

SEQ ID NO: 560 - protein, 30 aa, synthetic construct
QVQLQESGGGLVQAGGSLRLSCAASGPAFS

SEQ ID NO: 561 - protein, 30 aa, synthetic construct
QVQLVESGGGLVQAGGSLRLACAASGAAFS

SEQ ID NO: 562 - protein, 30 aa, synthetic construct
QVQLVESGGGLVQAGGSLRLSCAASGPAFS

SEQ ID NO: 563 - protein, 14 aa, synthetic construct
WFRQAPGKARDFVA

SEQ ID NO: 564 - protein, 32 aa, synthetic construct
RFTVSRDNAKNTVHLQMNSLRPEDTAVYYCAR

SEQ ID NO: 565 - protein, 32 aa, synthetic construct
RFTVSRDNAKNAVHLQMNSLRPEDTAVYYCAR

SEQ ID NO: 566 - protein, 11 aa, synthetic construct
WGPGTQVTVSS

SEQ ID NO: 567 - protein, 14 aa, synthetic construct
WFRQAPGKAREFVA

SEQ ID NO: 568 - protein, 32 aa, synthetic construct
RFTVSRDNAKMTVHLQMNSLRPEDTAVYYCAR

SEQ ID NO: 569 - protein, 30 aa, synthetic construct
QLQLVESGGGLVQPGGSLRLSCAASGSDFL

SEQ ID NO: 570 - protein, 14 aa, synthetic construct
WFRQAPGNQREFVA

SEQ ID NO: 571 - protein, 32 aa, synthetic construct
RFTISRDHTKNTVYLQMNSLKVEDTAVYYCNT

SEQ ID NO: 572 - protein, 11 aa, synthetic construct
WGQGTLVTVSS

SEQ ID NO: 573 - protein, 30 aa, synthetic construct
QVQLQESGGGLVQAGGSLRLSCATSGITSS

SEQ ID NO: 574 - protein, 14 aa, synthetic construct
WYRQAPGKQRELVA

SEQ ID NO: 575 - protein, 32 aa, synthetic construct
RFTISRDNAKNTVFLQMNSLKPEDTAEYYCHG

SEQ ID NO: 576 - protein, 11 aa, synthetic construct
WGEGTQVTVSS

SEQ ID NO: 577 - protein, 30 aa, synthetic construct
EVQLVESGGGLVQPGGSLRLSCAASGFPFS

SEQ ID NO: 578 - protein, 30 aa, synthetic construct
QVQLVESGGGLVQPGGSLRLSCAASGFNFS

SEQ ID NO: 579 - protein, 14 aa, synthetic construct
WVRQAPGKGLEWVS

SEQ ID NO: 580 - protein, 14 aa, synthetic construct
WVRQAPGKEVEWVS

SEQ ID NO: 581 - protein, 32 aa, synthetic construct
RFTISRDNAKKTAYLQMNSLKAEDTAVYYCAT

SEQ ID NO: 582 - protein, 32 aa, synthetic construct
RFTISRDNAKNTVYLQMSNLKAEDTAVYYCAT

SEQ ID NO: 583 - protein, 11 aa, synthetic construct
RGQGTQVTVSS

SEQ ID NO: 584 - protein, 30 aa, synthetic construct
QVQLVESGGGLVQPGGSVRLSCATSGSIFS

SEQ ID NO: 585 - protein, 14 aa, synthetic construct
WYRQAPGKEREFVA

SEQ ID NO: 586 - protein, 32 aa, synthetic construct
RFIISRENAKTTVYLQMNGLKPEDTAVYYCVI

SEQ ID NO: 587 - protein, 30 aa, synthetic construct
EVQLVESGGGLVQPGGSLRLSCAASGSVVS

SEQ ID NO: 588 - protein, 30 aa, synthetic construct
QVQLVESGGGLVQPGGSLRLSCAASGSDAS

SEQ ID NO: 589 - protein, 32 aa, synthetic construct
RFTISRENAKNTVYLQMNSLKPEDTAVYYCVI

SEQ ID NO: 590 - protein, 30 aa, synthetic construct
QLQLVESGGGLVQPGESLRLSCAASGFSFS

SEQ ID NO: 591 - protein, 14 aa, synthetic construct
WYRQAPGKERELVA

SEQ ID NO: 592 - protein, 32 aa, synthetic construct
RFTISRENAKNMVYLQMNSLKLEDTAVYYCNV

SEQ ID NO: 593 - protein, 32 aa, synthetic construct
RFTISRDNVKNMVYLQMNSLKLEDTAVYYCNV

SEQ ID NO: 594 - protein, 30 aa, synthetic construct
QLQLVESGGGLVQPGESLRLSCVVSGDIFS

SEQ ID NO: 595 - protein, 14 aa, synthetic construct
WYRQAPGKQREVVA

SEQ ID NO: 596 - protein, 32 aa, synthetic construct
RFAISRDNAKRTVYLQMNSLKFEDTAVYYCNV

SEQ ID NO: 597 - protein, 30 aa, synthetic construct
QVQLVESGGGLVQPGESLRLSCVVSGDIFS

SEQ ID NO: 598 - protein, 32 aa, synthetic construct
RFTISRDNAKRTVYLQMNSLKFEDTAVYYCNF

SEQ ID NO: 599 - protein, 30 aa, synthetic construct
QVQLVESGGGLVQPGGSLRLSCAASGFTFS

SEQ ID NO: 600 - protein, 14 aa, synthetic construct
WVRQAPGKRLEWVS

SEQ ID NO: 601 - protein, 32 aa, synthetic construct
RFTISRDNADNTLYLHMNNLKPEDTAVYYCAN

SEQ ID NO: 602 - protein, 30 aa, synthetic construct
QVQLVESGGGLVQPGGSLRLSCVASGGTFS

SEQ ID NO: 603 - protein, 32 aa, synthetic construct
RFTISRENAKNTVYLQMNTLKLEDTAVYYCVS

SEQ ID NO: 604 - protein, 29 aa, synthetic construct
  VARIANT 1: note = E or Q
  VARIANT 2: note = L or V
  VARIANT 5: note = V or Q
  VARIANT 10: note = L or S
  VARIANT 13: note = P or A
  VARIANT 15: note = A, E, or G
  VARIANT 17: note = L, R, or V
  VARIANT 20: note = A or S
  VARIANT 22: note = A or V
  VARIANT 23: note = A, T, or V
  VARIANT 26: note = A, D, F, G, I, P, R, or S
  VARIANT 27: note = A, D, I, N, P, S, T, or V
  VARIANT 28: note = A, F, null, S, or V
  VARIANT 29: note = I, L, null, or S
XXQLXESGGXVQXGXSXRLXCXXSGXXXX

SEQ ID NO: 605 - protein, 14 aa, synthetic construct
  VARIANT 2: note = F, V, or Y
  VARIANT 4: note = H or Q
  VARIANT 8: note = E or K
  VARIANT 9: note = A, D, E, G, R, or Q
  VARIANT 10: note = L or R
  VARIANT 11: note = D or E
  VARIANT 12: note = F, L, V, or W
  VARIANT 14: note = A or S
WXRXAPGXXXXXVX

SEQ ID NO: 606 - protein, 32 aa, synthetic construct
  VARIANT 3: note = A, I, or T
  VARIANT 4: note = I or V
  VARIANT 7: note = D, E, or V
  VARIANT 8: note = H, I, or N
  VARIANT 9: note = A or T
  VARIANT 10: note = D or K
  VARIANT 11: note = K, M, N, R, S, or T
  VARIANT 12: note = A, M, or T
  VARIANT 13: note = A, L, or V
  VARIANT 14: note = F, H, N, or Y
  VARIANT 16: note = H or Q
  VARIANT 18: note = N or S
  VARIANT 19: note = G, N, S, or T
  VARIANT 21: note = K or R
  VARIANT 22: note = A, F, L, P, or V
  VARIANT 27: note = V or E
  VARIANT 31: note = A, H, N, or V
  VARIANT 32: note = A, E, F, G, I, N, R, T, or V
RFXXSRXXXXXXXXLXMXXLXXEDTAXYYCXX

SEQ ID NO: 607 - protein, 11 aa, synthetic construct
  VARIANT 1: note = R or W
  VARIANT 3: note = Q, E, or P
  VARIANT 6: note = L or Q
  VARIANT 8: note = S or T
  VARIANT 10: note = S or V
XGXGTXVXVXS

SEQ ID NO: 608-614 - skipped (7 entries)

SEQ ID NO: 615 - protein, 17 aa, synthetic construct
AINLEGYATRYANSVKG

SEQ ID NO: 616 - protein, 17 aa, synthetic construct
AIDLYGRATRYANSVRG

SEQ ID NO: 617 - protein, 17 aa, synthetic construct
QINTGGLTDVYADSVKG

SEQ ID NO: 618 - protein, 17 aa, synthetic construct
SISTGARDTSYADSVKG

SEQ ID NO: 619 - protein, 30 aa, synthetic construct
QVQLVESGGGLVQAGGSLRLSCAASGRTFG

SEQ ID NO: 620 - protein, 14 aa, synthetic construct
WFRQAPGKGREFVA

SEQ ID NO: 621 - protein, 14 aa, synthetic construct
WFRQAPGREREFVA

SEQ ID NO: 622 - protein, 11 aa, synthetic construct
RGQGTQVTVVS

SEQ ID NO: 623 - skipped

SEQ ID NO: 624 - protein, 15 aa, synthetic construct
GGGGSGGGGSGGGGS

SEQ ID NO: 625 - protein, 23 aa, synthetic construct
  VARIANT 5: note = Q or V
  VARIANT 11: note = L or S
  VARIANT 14: note = A or P
QVQLXSGGGXQXGGSLRLSCAAS

SEQ ID NO: 626 - protein, 14 aa, synthetic construct
  VARIANT 2: note = F, Y, or V
  VARIANT 9: note = E, C, or G
  VARIANT 10: note = R or L
  VARIANT 12: note = F, G, L, or W
  VARIANT 14: note = A, S, or T
WXRQAPGKXXEXVX

SEQ ID NO: 627 - protein, 37 aa, synthetic construct
  VARIANT 2: note = A, Q, T, or V
  VARIANT 3: note = D or E
  VARIANT 5: note = V or A
  VARIANT 10: note = T or A
  VARIANT 11: note = I or V
  VARIANT 13: note = R or Q
  VARIANT 15: note = N or K
  VARIANT 17: note = K or A
  VARIANT 20: note = V, L, or M
  VARIANT 25: note = N or D
  VARIANT 26: note = S or N
  VARIANT 28: note = K or R
  VARIANT 30: note = E or D
  VARIANT 33: note = A or G
  VARIANT 34: note = V, I, T, or M
YXXSXKGRFXXSXDXAXNTXYLQMXXLXPXDTXXYYC

SEQ ID NO: 628 - protein, 166 aa, synthetic construct
SEVEFSHEYWMRHALTLAKRARDEREVPVGAVLVLNNRVIGEGWNRAIGLHDPTAHAEIMALRQGGLVMQNYRLIDATLYVTFEPCVMCAGAMIHSRIGRVVFGVRNSKRGAAGSLMNVLNYPGMNHRVEITEGILADECAALLCDFYRMPRQVFNAQKKAQSSIN

SEQ ID NO: 629 - protein, 166 aa, synthetic construct
SEVEFSHEYWMRHALTLAKRARDEGEVPVGAVLVLNNRVIGEGWNRAIGLYDPTAHAEIMALRQGGLVMQNYRLIDATLYVTFEPCVMCAGAMIHSRIGRVVFGVRNSKRGAAGSLMNVLNYPGMDHRVEITEGILADECAALLCDFYRMPRQVFNAQKKAQSSIN

SEQ ID NO: 630 - protein, 166 aa, synthetic construct
SEVEFSHEYWMRHALTLAKRARDEGEVPVGAVLVLNNRVIGEGWNRAIGLHDPTAHAEIMALRQGGLVMQNYRLIDATLYVTFEPCVMCAGAMIHSRIGRVVFGVRNSKRGAAGSLMNVLNYPGMDHRVEITEGILADECAALLCDFYRMPRQVFNAQKKAQSSIN

SEQ ID NO: 631 - protein, 166 aa, synthetic construct
SEVEFSHEYWMRHALTLAKRARDEREVPVGAVLVLNNRVIGEGWNRAIGLHDPTAHAEIMALRQGGLVMQNYGLIDATLYVTFEPCVMCAGAIIHSRIGRVVFGVRNSKRGAAGSLMNVLNYPGMNHRVEITEGILADECAALLCDFYRMPRQVFNAQKKAQSSIN

SEQ ID NO: 632 - protein, 166 aa, synthetic construct
SEVEFSHEYWMRHALTLAKRARDEREVPVGAVLVLNNRVIGEGWNRAIGLHDPTAHAEIMALRQGGLVMQNYRLIDATLYVTFEPCVMCAGAMIHSRIGRVVFGVRNSKRGAAGSLMNVLNYPGMDHRVEITEGILADECAALLCDFYRMPRQVFNAQKKAQSSIN

SEQ ID NO: 633 - protein, 166 aa, synthetic construct
SEVEFSHEYWMRHALTLAKRARDEGEVPVGAVLVLNNRVIGEGWNRAIGLYDPTAHAEIMALRQGGLVMQNYGLIDATLYVTFEPCVMCAGAMIHSRIGRVVFGVRNSKRGAAGSLMNVLNYPGMDHRVEITEGILADECAALLCDFYRMPRQVFNAQKKAQSSIN

SEQ ID NO: 634 - protein, 166 aa, synthetic construct
SEVEFSHEYWMRHALTLAKRARDEGEVPVGAVLVLNNRVIGEGWNRAIGLYDPTAHAEIMALRQGGLVMQNYGLIDATLYSTFEPCVMCAGAMIHSRIGRVVFGVRNSKRGAAGSLMNVLNYPGMDHRVEITEGILADECAALLCDFYRMPRRVFNAQKKAQSSIN

SEQ ID NO: 635 - protein, 166 aa, synthetic construct
SEVEFSHEYWMRHALTLAKRARDEGEVPVGAVLVLNNRVIGEGWNRAIGLYDPTAHAEIMALRQGGLVMQNYRLIDATLYVTFEPCVMCAGAMIHSRIGRVVFGVRNSKRGAAGSLMNVLNYPGMDHRVEITEGILANECAALLCDFYRMPRQVFNAQKKAQSSIN

SEQ ID NO: 636 - protein, 166 aa, synthetic construct
SEVEFSHEYWMRHALTLAKRARDEREVPVGAVLVLNNRVIGEGWNRAIGLHDPTAHAEIMALRQGGLVMQNYRLYDATLYSTFEPCVMCAGAMIHSRIGRVVFGVRNAKTGAAGSLMDVLHHPGMNHRVEITEGILADECAALLCRFFRMPRRVFNAQKKAQSSTD

SEQ ID NO: 637 - protein, 160 aa, Staphylococcus aureus; identical to SEQ ID NO: 309

SEQ ID NO: 638 - protein, 161 aa, Bacillus subtilis; identical to SEQ ID NO: 310

SEQ ID NO: 639 - protein, 183 aa, Salmonella enterica; identical to SEQ ID NO: 311
  source 1..183: note = serovar Typhimurium

SEQ ID NO: 640 - protein, 164 aa, Shewanella putrefaciens; identical to SEQ ID NO: 312

SEQ ID NO: 641 - protein, 173 aa, Haemophilus influenzae; identical to SEQ ID NO: 313

SEQ ID NO: 642 - protein, 161 aa, Caulobacter crescentus; identical to SEQ ID NO: 314

SEQ ID NO: 643 - protein, 178 aa, Geobacter sulfurreducens
MSSLKKTPIRDDAYWMGKAIREAAKAAARDEVPIGAVIVRDGAVIGRGHNLREGSNDPSAHAEMIAIRQAARRSANWRLTGATLYVTLEPCLMCMGAIILARLERVVFGCYDPKGAAGSLYDLSADPRLNHQVRLSPGVCQEECGTMLSDFFRDLRRRKKAKATPALFIDERKVPPEP

SEQ ID NO: 644 - protein, 171 aa, Streptococcus pyogenes
MPYSLEEQTYFMQEALKEAEKSLQKAEIPIGCVIVKDGEIIGRGHNAREESNQAIMHAEIMAINEANAHEGNWRLLDTTLFVTIEPCVMCSGAIGLARIPHVIYGASNQKFGGADSLYQILTDERLNHRVQVERGLLAADCANIMQTFFRQGRERKKIAKHLIKEQSDPFD

SEQ ID NO: 645 - protein, 151 aa, Aquifex aeolicus
MGKEYFLKVALREAKRAFEKGEVPVGAIIVKEGEIISKAHNSVEELKDPTAHAEMLAIKEACRRLNTKYLEGCELYVTLEPCIMCSYALVLSRIEKVIFSALDKKHGGVVSVFNILDEPTLNHRVKWEYYPLEEASELLSEFFKKLRNNII

SEQ ID NO: 646 - protein, 178 aa, Escherichia coli
MRRAFITGVFFLSEVEFSHEYWMRHALTLAKRAWDEREVPVGAVLVHNNRVIGEGWNRPIGRHDPTAHAEIMALRQGGLVMQNYRLIDATLYVTLEPCVMCAGAMIHSRIGRVVFGARDAKTGAAGSLMDVLHHPGMNHRVEITEGILADECAALLSDFFRMRRQEIKAQKKAQSSTD

SEQ ID NO: 647 - protein, 1380 aa, synthetic construct
MKKPYSIGLDIGTNSVGWAVITDDYKVPAKKMKVLGNTDRSHIKKNLIGALLFDAGNTAEDRRLKRTARRRYTRRRNRILYLQEIFAEEMNKIDESFFHRLDDSFLVPEDKRGSKYPIFATLQEEKEYHKQFPTIYHLRKQLAESNEKADLRLVYLALAHMIKYRGHFLIDDPKFKVQNNDIQGLFEKFVEEYDNVQETSLSKIKLNVTEILTAKIPKSEKQEQLLKNYPSEKKNTLFGNLIGLALGLTPNFKTNFSLENDAKLQISSESYEEDLGSLLALIGENFIELFSAVKNLSDGILLAGIVSDESPHAPLSTKMVIRFKEHEEDLAALKHFIKANLPEKYDEVFSDDSKNGYAGYVGVDSKVRKRNGKLATEEEFYKYLKDILNNVKGADYFLEKIKREDLLRKQRTFDNGTIPYQVHLEEMKAILQNQGEYYPFLKENKEKIQQILTFRIPYYVGPLARGNRDFAWLTRNSDQAIRPWNFEEVVDKASSAEDFINKMTNYDLYLPEEKVLPKHSLLYETFAVYNELTKVKFIAEGLRDYQFLDSGQKKQIVNQLFKEKRKVTEKDIIHYLHNVDGYDGIELKGIEKQFNASLSTYHDLLKIIKDKEFMDDPKNEEILENIVHTLTIFEDREMIKQRLAQYDSLFDEKVIKALTRRHYTGWGKLSAKLINGICDKQTNKTILDFLIDDDKINRNFMQLINDDGLSFKDIIQKAQVVGKIDDVKQVVQELPGSPAIKKGILQSIKIVDELVKVMGHAPESIVIEMARENQTTARGKKNSQQRYKRIEDALKNLAPGLDSNILKENPTDNIQLQNDRLFLYYLQNGKDMYTGEALDINQLSNYDIDHIVPQAFIKDDSLDNRVLTSSKDNRGKSDNVPSIEVVQKRKAFWQQLLDSKLISERKFNNLTKAERGGLDERDKVGFIKRQLVETRQITKHVAQILDARFNTEVNEKNQKIRKVKIITLKSNLVSNFRKEFGLYKVREINDYHHAHDAYLNAVVAKAILKKYPKLEPEFVYGDYQKYDLKRYISRSKDPKEIEKATEKYFFYSNLLNFFKEEVHYADGTIIKRENIEYSKDTGEIAWNKEKDFATVRKVLSCPQVNIVKKTEVQTGGFSKESILPKRNSDKLIARKKDWDPKKYGGFDSPTVAYSVLVVAKVEKGKSKKLKSVKELVGITIMERSSFEKDPVDFLEAKGYKEVRKDLIIKLPKYSLFELENGRKRMLASAGELQKGNELALPSKYVNFLYLASHYEKLKGSPEDNEQKQLFVEQHKHYLDEIIEQISEFSKRVILADANLDKVLSAYNKHRDKPIREQAENIIHLFTLTNLGAPAAFKYFDTTIDRKRYTSTKEVLDATLIHQSITGLYETRIDLSQLGGD

SEQ ID NO: 648 - DNA, 4140 bp, synthetic construct
  source 1..4140: mol_type = other DNA
atgaagaagccttattccatcggcttggacatcgggactaactccgtcggatgggctgtgattaccgacgactacaaggttcccgcaaaaaagatgaaagtgctcggcaatacagatcggtcacatattaagaagaacctgattggcgctctgcttttcgatgcaggtaatactgccgaggataggcgcctcaagagaacagcccggcgtagatacactcgcagaaggaaccggattctgtacctgcaagaaatttttgctgaagaaatgaataagatcgatgagtcattcttccaccgactggacgatagtttcctggtacctgaagacaaaaggggatccaagtaccccatttttgccacactccaagaagagaaggagtaccacaagcaatttccgaccatctaccaccttaggaagcagctggcagagtccaacgaaaaggcagacttgcggttagtctacctggctcttgcacacatgataaagtaccggggacatttcttaattgacgaccctaagtttaaagttcagaataacgatattcaaggcctcttcgaaaagtttgttgaggaatatgataacgtacaagaaacctctttgtctaaaattaagctcaatgtgactgagatcctcacagcaaagattcccaaaagcgagaaacaagagcaactcctgaagaactaccctagtgagaaaaagaacaccctttttggcaatctgatcgggctcgccctgggcctgacacctaacttcaaaacaaatttctccctggagaacgacgccaagctgcaaatctcatccgagagttacgaggaagacttaggatctctcctcgcactgattggagaaaacttcattgaactcttctccgccgtgaaaaatctgagtgacggcatccttctggccggaatcgtctctgacgagagtccccacgcgccgctgagcacaaagatggtcatccggttcaaagagcacgaagaagatctcgcggcactcaaacatttcatcaaagccaacttgccagaaaaatacgatgaagtattctccgacgatagcaaaaacggctatgcgggatacgtaggagtcgacagcaaggtgcggaagcgcaatggtaagcttgctacagaagaagaattttacaagtaccttaaagatatcctcaataatgttaagggggccgactacttcctcgaaaagatcaaaagggaggacctgttgaggaaacagcgtacctttgacaacggcacaatcccgtaccaggtgcacctcgaagaaatgaaagccattctgcagaaccagggggaatactatccattcctcaaggaaaacaaggaaaaaatccagcagatccttacgtttaggattccttactatgtgggccctttggcaaggggtaaccgggatttcgcttggctcaccaggaatagtgaccaggccataaggccctggaactttgaagaagtcgtcgacaaggcctcttccgccgaagacttcattaacaaaatgactaactacgatctctacctgccagaggaaaaagtccttccaaaacatagcctgctttacgaaaccttcgccgtatacaacgagcttacaaaagtcaagttcatcgcagagggtctcagggattaccaattccttgactctggccaaaaaaagcagatcgtgaatcaacttttcaaggagaaacgaaaggtgactgaaaaggacatcattcactacctgcacaacgtcgatggatacgacgggattgaactgaagggcatagaaaagcagttcaatgctagtttgtccacgtaccacgatctgcttaaaatcattaaggataaggaattcatggatgaccctaagaacgaagagattttggaaaacatcgtccacaccctgaccattttcgaggatagggagatgataaagcaacggctggcacagtacgactcactttttgacgagaaggtgataaaagcccttacaagaaggcattataccgggtggggcaagctctccgctaagctgatcaatggtatttgcgacaagcagaccaataagactattttggacttcctgattgacgatgataagataaaccgaaactttatgcagctgattaatgatgatggactgagctttaaagatatcattcagaaggcccaggtcgtcggcaagatcgacgacgtcaaacaggtggtgcaggaacttccaggatccccggccattaagaagggaatattacagtccatcaaaattgtggatgagctggtgaaagtcatgggacatgcacctgagtctatcgtcatagagatggctcgtgaaaaccagacgacagcccgaggaaagaagaacagccaacaacggtataaacggatcgaggatgcacttaagaatctggccccggggctggattctaatatcttaaaagaaaatccaaccgataatattcaacttcagaacgaccggctttttctgtattaccttcagaatggaaaagatatgtataccggagaagccctggatataaatcagctgagtaactatgatatcgaccacattgtgcctcaggctttcattaaggatgacagcctggacaatcgcgtactcacatcctccaaggacaacagaggcaagagcgataacgtccctagcatcgaagtggtacaaaagcgtaaggccttctggcagcagctcttagactctaaattgataagcgaacggaaattcaataacctcacaaaggccgagcgtggtggcttggacgagagagacaaggtgggcttcattaaacggcagctcgtggaaaccagacagataaccaagcacgttgcccagatcctcgatgccaggttcaacaccgaagttaacgagaaaaaccaaaagattcggaaagtgaagatcatcactctcaagtctaatttggtgtccaactttagaaaagagtttggactctataaggtccgagagattaatgattatcaccacgctcacgatgcctacctcaacgcagtggtggccaaggccatcctgaaaaaatatcctaagctcgagcctgagttcgtctatggtgactatcagaagtacgacctcaagcgctatattagtaggagcaaggatcctaaagagatcgaaaaggccacagaaaagtacttcttttacagcaacttactcaacttcttcaaagaagaagtccactacgctgatggcaccatcatcaagcgagaaaatatagagtacagtaaggacacaggcgaaatcgcctggaataaagagaaggatttcgctactgtgcgaaaagttctgtcttgcccccaggtgaacattgtgaaaaagactgaggtgcagactggcgggtttagcaaagagagtatcctgccaaagcggaatagcgataagttaattgctcggaaaaaggactgggatccaaagaagtacggcggcttcgattccccaaccgttgcctacagcgtcctcgtcgtcgccaaggtggagaagggtaaaagcaagaagctgaaaagtgtaaaggaactggtcggcattaccattatggagcggagttccttcgaaaaggatccagttgattttttagaagccaaggggtataaggaggtgcgcaaggatttaattattaaactccccaagtacagcctgtttgagctggagaacggaaggaagaggatgctggctagcgccggcgagctccaaaagggcaatgagctcgccctgccaagcaagtacgtgaactttctctatctggctagccactacgagaagctgaagggatcacctgaagacaatgagcagaaacagctgttcgtcgagcagcataaacactacctcgacgaaattattgagcaaattagtgagttctcaaagcgggtaatcctcgcagatgcaaatctggataaagtgttaagcgcgtataataagcaccgggacaaaccaatccgggagcaagccgagaacatcattcatctcttcacactgaccaatcttggggctcctgcagcttttaaatatttcgatacaaccatcgacaggaagcgatatacttctacaaaggaagtgcttgatgcaactctcatccatcaaagcatcacggggctgtatgaaacccggattgacctgagtcagctgggtggggac

SEQ ID NO: 649 - RNA, 86 nt, synthetic construct
  source 1..86: mol_type = other RNA
gttttagagctgtgttgaaaaacacagcaagttaaaataaggctttgtccgtatccaacttgaaaaagtgagcaccgattcggtgc

SEQ ID NO: 650 - RNA, 78 nt, synthetic construct
  source 1..78: mol_type = other RNA
gttttagagctggaaacagcaagttaaaataaggctttgtccgtatccaacttgaaaaagtgagcaccgattcggtgc

SEQ ID NO: 651 - RNA, 76 nt, synthetic construct; identical to SEQ ID NO: 319
  source 1..76: mol_type = other RNA

SEQ ID NO: 652 - protein, 167 aa, synthetic construct
MSEVEFSHEYWMRHALTLAKRARDEREVPVGAVLVLNNRVIGEGWNRAIGLHDPTAHAEIMALRQGGLVMQNYRLIDATLYVTFEPCVMCAGAMIHSRIGRVVFGVRNSKRGAAGSLMNVLNYPGMNHRVEITEGILADECAALLCDFYRMPRQVFNAQKKAQSSIN

SEQ ID NO: 653 - protein, 167 aa, synthetic construct
MSEVEFSHEYWMRHALTLAKRARDEGAGPVGAVLVLNNRVIGEGWNRAIGLHDPTAHAEIMALRQGGLVMQNYRLFDATLYVTFEPCVMCAGAMINSRIGRVVFGVRNSKRGAAGSLMNVLNYPGMNHRVEITEGILADECAALLCDFYRMPRQVFNSQKKAQSSIN

SEQ ID NO: 654 - protein, 167 aa, synthetic construct
MSEVEFSHEYWMRHALTLAKRARDEGAGPVGAVLVLNNRVIGEGWNRAIGLHDPTAHAEIMALRQGGLVMQNYRLFDATLYVTFEPCVMCAGAMINSRIGRVVFGVRNSKRGAAGSLMNVLNYPGMNHRVEITEGILADECAALLCDFYRMPRRVFNSQKKAQSSIN

SEQ ID NO: 655 - protein, 167 aa, synthetic construct
MSEVEFSHEYWMRHALTLAKRARDEGAGPVGAVLVLNNRVIGEGWNRAIGLHDPTAHAEIMALRQGGLVMQNYRLFDATLYVTFEPCVMCAGAMINSRIGRVVFGVRNSKRGAAGSLMNVLNYPGMNHRVEITEGILADECAALLCDFYRIPRQVFNSQKKAQSSIN

SEQ ID NO: 656 - protein, 167 aa, synthetic construct
MSEVEFSHEYWMRHALTLAKRARDERKAPVGAVLVLNNRVIGEGWNRAIGLHDPTAHAEIIALRQGGLVMQNYRLIDATLYVTFEPCVMCAGAMINSRIGRVVFGVRNSKRGAAGSLMNVLNYPGMNHRVEITEGILADECAALLCDFYRMPRQVFNAQKKAQSSIN

SEQ ID NO: 657 - protein, 167 aa, synthetic construct
MSEVEFSHEYWMRHALTLAKRARDERAGPVGAVLVLNNRVIGEGWNRAIGLHDPTAHAEIMALRQGGLVMQNHRLIDATLYVTFEPCVMCAGAMINSRIGRVVFGVRNSKRGAAGSLMNVLNYPGMNHRVEITEGILADECAALLCDFYRMPRHVFNSQKKAQSSIN

SEQ ID NO: 658 - protein, 167 aa, synthetic construct
MSEVEFSHEYWMRHALTLAKRARDEGEAPVGAVLVLNNRVIGEGWNRRIGLHDPTAHAEIMALRQGGLVMQNSRLIDATLYVTFEPCVMCAGAMINSRIGRVVFGVRNSKRGAAGSLMNVLNYPGMNHRVEITEGILADECAALLCDFYRMPRQVFNAQKKAQSSIN

SEQ ID NO: 659 - protein, 167 aa, synthetic construct
MSEVEFSHEYWMRHALTLAKRARDEGEGPVGAVLVLNNRVIGEGWNRRIGLHDPTAHAEIMALRQGGLVMQNCRLIDATLYVTFEPCVMCAGAMIHSRIGRVVFGVRNSKRGAAGSLMNVLNYPGMNHRVEITEGILADECAALLCDFYRMPRQVFNAQKKAQSSIN

SEQ ID NO: 660 - protein, 167 aa, synthetic construct
MSEVEFSHEYWMRHALTLAKRARDEGEAPVGAVLVLNNRVIGEGWIRRIGLHDPTAHAEIMALRQGGLVMQNPRLIDATLYVTFEPCVMCAGAMINSRIGRVVFGVRNSKRGAAGSLMNVLNYPGMNHRVEITEGILADECAALLCDFYRMPRQVFNAQKKAQSSIN

SEQ ID NO: 661 - protein, 167 aa, synthetic construct
MSEVEFSHEYWMRHALTLAKRARDEGEAPVGAVLVLNNRVIGEGWTRRIGLHDPTAHAEIMALRQGGLVMQNSRLIDATLYVTFEPCVMCAGAMINSRIGRVVFGVRNSKRGAAGSLMNVLNYPGMNHRVEITEGILADECAALLCDFYRMPRHVFNAQKKAQSSIN

SEQ ID NO: 662 - protein, 167 aa, synthetic construct
MSEVEFSHEYWMRHALTLAKRARDEGEAPVGAVLVLNNRVIGEGWTRRIGLHDPTAHAEIMALRQGGLVMQNSRLIDATLYVTFEPCVMCAGAMINSRIGRVVFGVRNSKRGAAGSLMNVLNYPGMNHRVEITEGILADECAALLCDFYRMPRQVFNAQKKAQSSIN

SEQ ID NO: 663 - protein, 167 aa, synthetic construct
MSEVEFSHEYWMRHALTLAKRARDEGEAPVGAVLVLNNRVIGEGWVRRIGLHDPTAHAEIMALRQGGLVMQNSRLIDATLYVTFEPCVMCAGAMINSRIGRVVFGVRNSKRGAAGSLMNVLNYPGMNHRVEITEGILADECAALLCDFYRMPRQVFNAQKKAQSSIN

SEQ ID NO: 664 - protein, 167 aa, synthetic construct
MSEVEFSHEYWMRHALTLAKRARDEGEAPVGAVLVLNNRVIGEGWVRRIGLHDPTAHAEIMALRQGGLVMQNPRLIDATLYVTFEPCVMCAGAMINSRIGRVVFSVRNSKRGAAGSLMNVLNYPGMNHRVEITEGILADECAALLCDFYRMPRQVFNAQKKAQSSIN

SEQ ID NO: 665 - protein, 167 aa, synthetic construct
MSEVEFSHEYWMRHALTLAKRARDEGEAPVGAVLVLNNRVIGEGWLRRIGLHDPTAHAEIMALRQGGLVMQNPRLIDATLYVTFEPCVMCAGAMINSRIGRVVFGVRNSKRGAAGSLMNVLNYPGMNHRVEITEGILADECAALLCDFYRMPRQVFNAQKKAQSSIN

SEQ ID NO: 666 - protein, 167 aa, synthetic construct
MSEVEFSHEYWMRHALTLAKRARDEREAPVGAVLVLNNRVIGEGWLRPIGLHDPTAHAEIMALRQGGLVMQNPRLIDATLYVTFEPCVMCAGAMIHSRIGRVVFGVRNSKRGAAGSLMNVLNYPGMNHRVEITEGILADECAALLCDFYRMPRQVFNAQKKAQSSIN

SEQ ID NO: 667 - protein, 167 aa, synthetic construct
MSEVEFSHEYWMRHALTLAKRARDEGEAPVGAVLVLNNRVIGEGWCRRIGLHDPTAHAEIMALRQGGLVMQNSRLIDATLYVTFEPCVMCAGAMIHSRIGRVVFGVRNSKRGAAGSLMNVLNYPGMNHRVEITEGILADECAALLCDFYRMPRQVFNAQKKAQSSIN

SEQ ID NO: 668 - protein, 167 aa, synthetic construct
MSEVEFSHEYWMRHALTLAKRARDEGEAPVGAVLVLNNRVIGEGWVRRIGLHDPTAHAEIMALRQGGLVMQNPRLIDATLYVTFEPCVMCAGAMINSRIGRVVFGVRNSKRGAAGSLMNVLNYPGMNHRVEITEGILADECAALLCDFYRMPRQVFNAQKKAQSSIN

SEQ ID NO: 669 - protein, 167 aa, synthetic construct
MSEVEFSHEYWMRHALTLAKRARDEGEAPVGAVLVLNNRVIGEGWVRRIGLHDPTAHAEIMALRQGGLVMHNPRLIDATLYVTFEPCVMCAGAMINSRIGRVVFGVRNSKRGAAGSLMNVLNYPGMNHRVEITEGILADECAALLCDFYRMPRQVFNAQKKAQSSIN

SEQ ID NO: 670 - protein, 167 aa, synthetic construct
MSEVEFSHEYWMRHALTLAKRARDEGEAPVGAVLVLNNRVIGEGWLRRIGLHDPTAHAEIMALRQGGLVMQNSRLIDATLYVTFEPCVMCAGAMINSRIGRVVFGVRNSKRGAAGSLMNVLNYPGMNHRVEITEGILADECAALLCDFYRMPRQVFNAQKKAQSSIN

SEQ ID NO: 671 - protein, 167 aa, synthetic construct
MSEVEFSHEYWMRHALTLAKRARDEGEAPVGAVLVLNNRVIGEGWCRRIGLHDPTAHAEIMALRQGGLVMQNPRLIDATLYVTFEPCVMCAGAMINSRIGRVVFGVRNSKRGAAGSLMNVLNYPGMNHRVEITEGILADECAALLCDFYRMPRQVFNAQKKAQSSIN

SEQ ID NO: 672 - protein, 167 aa, synthetic construct
MSEVEFSHEYWMRHALTLAKRARDEGEAPVGAVLVLNNRVIGEGWCRRIGLHDPTAHAEIMALRQGGLVMQNPRLIDATLYVTFEPCVMCAGAMINSRIGRVVFGVRNSKRGAAGSLMNVLNYPGMNHRVEITEGILADECAALLCDFYRMPRQVFNAQKKVQSSIN

SEQ ID NO: 673 - protein, 167 aa, synthetic construct
MSEVEFSHEYWMRHALTLAKRARDEGEAPVGAVLVLNNRVIGEGWIRRIGLHDPTAHAEIMALRQGGLVMQNSRLIDATLYVTFEPCVMCAGAMINSRIGRVVFGVRNSKRGAAGSLMNVLNYPGMNHRVEITEGILADECAALLCDFYRMPRQVFNAQKKAQSSIN

SEQ ID NO: 674 - protein, 167 aa, synthetic construct
MSEVEFSHEYWMRHALTLAKRARDEGEAPVGAVLVLNNRVIGEGWNRRIGLHDPTAHAEIMALRQGGLVMSNSRLIDATLYVTFEPCVMCAGAMINSRIGRVVFGVRNSKRGAAGSLMNVLNYPGMNHRVEITEGILADECAALLCDFYRMPRQVFNAQKKAQSSIN

SEQ ID NO: 675 - protein, 167 aa, synthetic construct
MSEVEFSHEYWMRHALTLAKRARDEGEAPVGAVLVLNNRVIGEGWLRRIGLHDPTAHAEIMALRQGGLVMQNPRLIDATLYVTFEPCVMCAGAMIHSRIGRVVFGVRNSKRGAAGSLMNVLNYPGMNHRVEITEGILADECAALLCDFYRMPRQVFNAQKKAQSSIN

SEQ ID NO: 676 - protein, 167 aa, synthetic construct; identical to SEQ ID NO: 665

SEQ ID NO: 677 - protein, 167 aa, synthetic construct
MSEVEFSHEYWMRHALTLAKRARDEGEAPVGAVLVLNNRVIGEGWNRAIGLHDPTAHAEIMALRQGGLVMQNPRLIDATLYVTFEPCVMCAGAMINSRIGRVVFGVRNSKRGAAGSLMNVLNYPGMNHRVEITEGILADECAALLCDFYRMPRQVFNAQKKAQSSIN

SEQ ID NO: 678 - protein, 167 aa, synthetic construct; identical to SEQ ID NO: 663

SEQ ID NO: 679 - protein, 167 aa, synthetic construct; identical to SEQ ID NO: 668

SEQ ID NO: 680 - protein, 167 aa, synthetic construct
MSEVEFSHEYWMRHALTLAKRARDEGEVPVGAVLVLNNRVIGEGWLRAIGLHDPTAHAEIMALRQGGLVMQNYRLIDATLYVTFEPCVMCAGAMIHSRIGRVVFGVRNSKRGAAGSLMNVLNYPGMNHRVEITEGILADECAALLCDFYRMPRQVFNAQKKAQSSIN

SEQ ID NO: 681 - protein, 167 aa, synthetic construct; identical to SEQ ID NO: 660

SEQ ID NO: 682 - protein, 167 aa, synthetic construct; identical to SEQ ID NO: 664

SEQ ID NO: 683 - protein, 167 aa, synthetic construct
MSEVEFSHEYWMRHALTLAKRARDEGEAPVGAVLVLNNRVIGEGWNRPIGLHDPTAHAEIMALRQGGLVMQNHRLIDAPLYVTFEPCVMCAGAMINSRIGRVVFGVRNSKRGAAGSLMNVLNYPGMNHRVEITEGILADECAALLCDFYRMPRQVFNAQKKAQSSIN

SEQ ID NO: 684 - protein, 167 aa, synthetic construct
MSEVEFSHEYWMRHALTLAKRARDEGEVPVGAVLVLNNRVIGEGWIRAIGLHDPTAHAEIMALRQGGLVMQNYRLIDATLYVTFEPCVMCAGAMINSRIGRVVFGVRNSKRGAAGSLMNVLNYPGMNHRVEITEGILADECAALLCDFYRMPRQVFNAQKKAQSSIN

SEQ ID NO: 685 - protein, 167 aa, synthetic construct; identical to SEQ ID NO: 668

SEQ ID NO: 686 - protein, 167 aa, synthetic construct; identical to SEQ ID NO: 670

SEQ ID NO: 687 - protein, 167 aa, synthetic construct
MSEVEFSHEYWMRHALTLAKRARDEGEAPVGAVLVLNNRVIGEGWCRRIGLHDPTAHAEIMALRQGGLVMQNYRLIDATLYVTFEPCVMCAGAMINSRIGRVVFGVRNSKRGAAGSLMNVLNYPGMNHRVEITEGILADECAALLCDFYRMPRQVFNAQKKVQSSIN

SEQ ID NO: 688 - protein, 167 aa, synthetic construct; identical to SEQ ID NO: 669

SEQ ID NO: 689 - protein, 167 aa, synthetic construct; identical to SEQ ID NO: 671

SEQ ID NO: 690 - protein, 167 aa, synthetic construct; identical to SEQ ID NO: 672

SEQ ID NO: 691 - protein, 167 aa, synthetic construct; identical to SEQ ID NO: 668

SEQ ID NO: 692 - protein, 167 aa, synthetic construct; identical to SEQ ID NO: 663

SEQ ID NO: 693 - protein, 167 aa, synthetic construct
MSEVEFSHEYWMRHALTLAKRARDEGEAPVGAVLVLNNRVIGEGWVRPIGLHDPTAHAEIMALRQGGLVMQNSRLIDATLYVTFEPCVMCAGAMINSRIGRVVFGVRNSKRGAAGSLMNVLNYPGMNHRVEITEGILADECAALLCDFYRMPRQVFNAQKKAQSSIN

SEQ ID NO: 694 - protein, 167 aa, synthetic construct; identical to SEQ ID NO: 671

SEQ ID NO: 695 - protein, 167 aa, synthetic construct
MSEVEFSHEYWMRHALTLAKRARDEGEAPVGAVMVLNNRVIGEGWLRRIGLHDPTAHAEIMALRQGGLVMQNPRLIDATLYVTFEPCVMCAGAMINSRIGRVVFGVRNSKRGAAGSLMNVLNYPGMNHRVEITEGILADECAALLCDFYRMPRQVFNAQKKAQSSIN

SEQ ID NO: 696 - protein, 167 aa, synthetic construct; identical to SEQ ID NO: 665

SEQ ID NO: 697 - protein, 167 aa, synthetic construct
MSEVEFSHEYWMRHALTLAKRARDEGEAPVGAVLVLNNRVIGEGWLRPIGLHDPTAHAEIMALKQGGLVMQNPRLIDATLYVTFEPCVMCAGAMINSRIGRVVFGVRNSKRGAAGSLMNVLNYPGMNHRVEITEGILADECAALLCDFYRMPRQVFNAQKKAQSSIN

SEQ ID NO: 698 - protein, 1699 aa, synthetic construct
MKRTADGSEFESPKKKRKVSSEVEFSHEYWMRHALTLAKRARDEGAGPVGAVLVLNNRVIGEGWNRAIGLHDPTAHAEIMALRQGGLVMQNYRLFDATLYVTFEPCVMCAGAMINSRIGRVVFGVRNSKRGAAGSLMNVLNYPGMNHRVEITEGILADECAALLCDFYRMPRQVFNSQKKAQSSINSGGSSGGSSGSETPGTSESATPESSGGSSGGSDKKYSIGLAIGTNSVGWAVITDEYKVPSKKFKVLGNTDRHSIKKNLIGALLFDSGETAEATRLKRTARRRYTRRKNRICYLQEIFSNEMAKVDDSFFHRLEESFLVEEDKKHERHPIFGNIVDEVAYHEKYPTIYHLRKKLVDSTDKADLRLIYLALAHMIKFRGHFLIEGDLNPDNSDVDKLFIQLVQTYNQLFEENPINASGVDAKAILSARLSKSRRLENLIAQLPGEKKNGLFGNLIALSLGLTPNFKSNFDLAEDAKLQLSKDTYDDDLDNLLAQIGDQYADLFLAAKNLSDAILLSDILRVNTEITKAPLSASMIKRYDEHHQDLTLLKALVRQQLPEKYKEIFFDQSKNGYAGYIDGGASQEEFYKFIKPILEKMDGTEELLVKLNREDLLRKQRTFDNGSIPHQIHLGELHAILRRQEDFYPFLKDNREKIEKILTFRIPYYVGPLARGNSRFAWMTRKSEETITPWNFEEVVDKGASAQSFIERMTNFDKNLPNEKVLPKHSLLYEYFTVYNELTKVKYVTEGMRKPAFLSGEQKKAIVDLLFKTNRKVTVKQLKEDYFKKIECFDSVEISGVEDRFNASLGTYHDLLKIIKDKDFLDNEENEDILEDIVLTLTLFEDREMIEERLKTYAHLFDDKVMKQLKRRRYTGWGRLSRKLINGIRDKQSGKTILDFLKSDGFANRNFMQLIHDDSLTFKEDIQKAQVSGQGDSLHEHIANLAGSPAIKKGILQTVKVVDELVKVMGRHKPENIVIEMARENQTTQKGQKNSRERMKRIEEGIKELGSQILKEHPVENTQLQNEKLYLYYLQNGRDMYVDQELDINRLSDYDVDHIVPQSFLKDDSIDNKVLTRSDKNRGKSDNVPSEEVVKKMKNYWRQLLNAKLITQRKFDNLTKAERGGLSELDKAGFIKRQLVETRQITKHVAQILDSRMNTKYDENDKLIREVKVITLKSKLVSDFRKDFQFYKVREINNYHHAHDAYLNAVVGTALIKKYPKLESEFVYGDYKVYDVRKMIAKSEQEIGKATAKYFFYSNIMNFFKTEITLANGEIRKRPLIETNGETGEIVWDKGRDFATVRKVLSMPQVNIVKKTEVQTGGFSKESILPKRNSDKLIARKKDWDPKKYGGFDSPTVAYSVLVVAKVEKGKSKKLKSVKELLGITIMERSSFEKNPIDFLEAKGYKEVKKDLIIKLPKYSLFELENGRKRMLASAGELQKGNELALPSKYVNFLYLASHYEKLKGSPEDNEQKQLFVEQHKHYLDEIIEQISEFSKRVILADANLDKVLSAYNKHRDKPIREQAENIIHLFTLTNLGAPAAFKYFDTTIDRKRYTSTKEVLDATLIHQSITGLYETRIDLSQLGGDSGGSGGSGGSTNLSDIIEKETGKQLVIQESILMLPEEVEEVIGNKPESDILVHTAYDESTDENVMLLTSDAPEYKPWALVIQDSNGENKIKMLSGGSKRTADGSEFEPKKKRKV

SEQ ID NO: 699 - protein, 1699 aa, synthetic construct
MKRTADGSEFESPKKKRKVSSEVEFSHEYWMRHALTLAKRARDEGAGPVGAVLVLNNRVIGEGWNRAIGLHDPTAHAEIMALRQGGLVMQNYRLFDATLYVTFEPCVMCAGAMINSRIGRVVFGVRNSKRGAAGSLMNVLNYPGMNHRVEITEGILADECAALLCDFYRMPRRVFNSQKKAQSSINSGGSSGGSSGSETPGTSESATPESSGGSSGGSDKKYSIGLAIGTNSVGWAVITDEYKVPSKKFKVLGNTDRHSIKKNLIGALLFDSGETAEATRLKRTARRRYTRRKNRICYLQEIFSNEMAKVDDSFFHRLEESFLVEEDKKHERHPIFGNIVDEVAYHEKYPTIYHLRKKLVDSTDKADLRLIYLALAHMIKFRGHFLIEGDLNPDNSDVDKLFIQLVQTYNQLFEENPINASGVDAKAILSARLSKSRRLENLIAQLPGEKKNGLFGNLIALSLGLTPNFKSNFDLAEDAKLQLSKDTYDDDLDNLLAQIGDQYADLFLAAKNLSDAILLSDILRVNTEITKAPLSASMIKRYDEHHQDLTLLKALVRQQLPEKYKEIFFDQSKNGYAGYIDGGASQEEFYKFIKPILEKMDGTEELLVKLNREDLLRKQRTFDNGSIPHQIHLGELHAILRRQEDFYPFLKDNREKIEKILTFRIPYYVGPLARGNSRFAWMTRKSEETITPWNFEEVVDKGASAQSFIERMTNFDKNLPNEKVLPKHSLLYEYFTVYNELTKVKYVTEGMRKPAFLSGEQKKAIVDLLFKTNRKVTVKQLKEDYFKKIECFDSVEISGVEDRFNASLGTYHDLLKIIKDKDFLDNEENEDILEDIVLTLTLFEDREMIEERLKTYAHLFDDKVMKQLKRRRYTGWGRLSRKLINGIRDKQSGKTILDFLKSDGFANRNFMQLIHDDSLTFKEDIQKAQVSGQGDSLHEHIANLAGSPAIKKGILQTVKVVDELVKVMGRHKPENIVIEMARENQTTQKGQKNSRERMKRIEEGIKELGSQILKEHPVENTQLQNEKLYLYYLQNGRDMYVDQELDINRLSDYDVDHIVPQSFLKDDSIDNKVLTRSDKNRGKSDNVPSEEVVKKMKNYWRQLLNAKLITQRKFDNLTKAERGGLSELDKAGFIKRQLVETRQITKHVAQILDSRMNTKYDENDKLIREVKVITLKSKLVSDFRKDFQFYKVREINNYHHAHDAYLNAVVGTALIKKYPKLESEFVYGDYKVYDVRKMIAKSEQEIGKATAKYFFYSNIMNFFKTEITLANGEIRKRPLIETNGETGEIVWDKGRDFATVRKVLSMPQVNIVKKTEVQTGGFSKESILPKRNSDKLIARKKDWDPKKYGGFDSPTVAYSVLVVAKVEKGKSKKLKSVKELLGITIMERSSFEKNPIDFLEAKGYKEVKKDLIIKLPKYSLFELENGRKRMLASAGELQKGNELALPSKYVNFLYLASHYEKLKGSPEDNEQKQLFVEQHKHYLDEIIEQISEFSKRVILADANLDKVLSAYNKHRDKPIREQAENIIHLFTLTNLGAPAAFKYFDTTIDRKRYTSTKEVLDATLIHQSITGLYETRIDLSQLGGDSGGSGGSGGSTNLSDIIEKETGKQLVIQESILMLPEEVEEVIGNKPESDILVHTAYDESTDENVMLLTSDAPEYKPWALVIQDSNGENKIKMLSGGSKRTADGSEFEPKKKRKV

SEQ ID NO: 700 - protein, 1699 aa, synthetic construct
MKRTADGSEFESPKKKRKVSSEVEFSHEYWMRHALTLAKRARDEGAGPVGAVLVLNNRVIGEGWNRAIGLHDPTAHAEIMALRQGGLVMQNYRLFDATLYVTFEPCVMCAGAMINSRIGRVVFGVRNSKRGAAGSLMNVLNYPGMNHRVEITEGILADECAALLCDFYRIPRQVFNSQKKAQSSINSGGSSGGSSGSETPGTSESATPESSGGSSGGSDKKYSIGLAIGTNSVGWAVITDEYKVPSKKFKVLGNTDRHSIKKNLIGALLFDSGETAEATRLKRTARRRYTRRKNRICYLQEIFSNEMAKVDDSFFHRLEESFLVEEDKKHERHPIFGNIVDEVAYHEKYPTIYHLRKKLVDSTDKADLRLIYLALAHMIKFRGHFLIEGDLNPDNSDVDKLFIQLVQTYNQLFEENPINASGVDAKAILSARLSKSRRLENLIAQLPGEKKNGLFGNLIALSLGLTPNFKSNFDLAEDAKLQLSKDTYDDDLDNLLAQIGDQYADLFLAAKNLSDAILLSDILRVNTEITKAPLSASMIKRYDEHHQDLTLLKALVRQQLPEKYKEIFFDQSKNGYAGYIDGGASQEEFYKFIKPILEKMDGTEELLVKLNREDLLRKQRTFDNGSIPHQIHLGELHAILRRQEDFYPFLKDNREKIEKILTFRIPYYVGPLARGNSRFAWMTRKSEETITPWNFEEVVDKGASAQSFIERMTNFDKNLPNEKVLPKHSLLYEYFTVYNELTKVKYVTEGMRKPAFLSGEQKKAIVDLLFKTNRKVTVKQLKEDYFKKIECFDSVEISGVEDRFNASLGTYHDLLKIIKDKDFLDNEENEDILEDIVLTLTLFEDREMIEERLKTYAHLFDDKVMKQLKRRRYTGWGRLSRKLINGIRDKQSGKTILDFLKSDGFANRNFMQLIHDDSLTFKEDIQKAQVSGQGDSLHEHIANLAGSPAIKKGILQTVKVVDELVKVMGRHKPENIVIEMARENQTTQKGQKNSRERMKRIEEGIKELGSQILKEHPVENTQLQNEKLYLYYLQNGRDMYVDQELDINRLSDYDVDHIVPQSFLKDDSIDNKVLTRSDKNRGKSDNVPSEEVVKKMKNYWRQLLNAKLITQRKFDNLTKAERGGLSELDKAGFIKRQLVETRQITKHVAQILDSRMNTKYDENDKLIREVKVITLKSKLVSDFRKDFQFYKVREINNYHHAHDAYLNAVVGTALIKKYPKLESEFVYGDYKVYDVRKMIAKSEQEIGKATAKYFFYSNIMNFFKTEITLANGEIRKRPLIETNGETGEIVWDKGRDFATVRKVLSMPQVNIVKKTEVQTGGFSKESILPKRNSDKLIARKKDWDPKKYGGFDSPTVAYSVLVVAKVEKGKSKKLKSVKELLGITIMERSSFEKNPIDFLEAKGYKEVKKDLIIKLPKYSLFELENGRKRMLASAGELQKGNELALPSKYVNFLYLASHYEKLKGSPEDNEQKQLFVEQHKHYLDEIIEQISEFSKRVILADANLDKVLSAYNKHRDKPIREQAENIIHLFTLTNLGAPAAFKYFDTTIDRKRYTSTKEVLDATLIHQSITGLYETRIDLSQLGGDSGGSGGSGGSTNLSDIIEKETGKQLVIQESILMLPEEVEEVIGNKPESDILVHTAYDESTDENVMLLTSDAPEYKPWALVIQDSNGENKIKMLSGGSKRTADGSEFEPKKKRKV

SEQ ID NO: 701 - protein, 1699 aa, synthetic construct
MKRTADGSEFESPKKKRKVSSEVEFSHEYWMRHALTLAKRARDERKAPVGAVLVLNNRVIGEGWNRAIGLHDPTAHAEIIALRQGGLVMQNYRLIDATLYVTFEPCVMCAGAMINSRIGRVVFGVRNSKRGAAGSLMNVLNYPGMNHRVEITEGILADECAALLCDFYRMPRQVFNAQKKAQSSINSGGSSGGSSGSETPGTSESATPESSGGSSGGSDKKYSIGLAIGTNSVGWAVITDEYKVPSKKFKVLGNTDRHSIKKNLIGALLFDSGETAEATRLKRTARRRYTRRKNRICYLQEIFSNEMAKVDDSFFHRLEESFLVEEDKKHERHPIFGNIVDEVAYHEKYPTIYHLRKKLVDSTDKADLRLIYLALAHMIKFRGHFLIEGDLNPDNSDVDKLFIQLVQTYNQLFEENPINASGVDAKAILSARLSKSRRLENLIAQLPGEKKNGLFGNLIALSLGLTPNFKSNFDLAEDAKLQLSKDTYDDDLDNLLAQIGDQYADLFLAAKNLSDAILLSDILRVNTEITKAPLSASMIKRYDEHHQDLTLLKALVRQQLPEKYKEIFFDQSKNGYAGYIDGGASQEEFYKFIKPILEKMDGTEELLVKLNREDLLRKQRTFDNGSIPHQIHLGELHAILRRQEDFYPFLKDNREKIEKILTFRIPYYVGPLARGNSRFAWMTRKSEETITPWNFEEVVDKGASAQSFIERMTNFDKNLPNEKVLPKHSLLYEYFTVYNELTKVKYVTEGMRKPAFLSGEQKKAIVDLLFKTNRKVTVKQLKEDYFKKIECFDSVEISGVEDRFNASLGTYHDLLKIIKDKDFLDNEENEDILEDIVLTLTLFEDREMIEERLKTYAHLFDDKVMKQLKRRRYTGWGRLSRKLINGIRDKQSGKTILDFLKSDGFANRNFMQLIHDDSLTFKEDIQKAQVSGQGDSLHEHIANLAGSPAIKKGILQTVKVVDELVKVMGRHKPENIVIEMARENQTTQKGQKNSRERMKRIEEGIKELGSQILKEHPVENTQLQNEKLYLYYLQNGRDMYVDQELDINRLSDYDVDHIVPQSFLKDDSIDNKVLTRSDKNRGKSDNVPSEEVVKKMKNYWRQLLNAKLITQRKFDNLTKAERGGLSELDKAGFIKRQLVETRQITKHVAQILDSRMNTKYDENDKLIREVKVITLKSKLVSDFRKDFQFYKVREINNYHHAHDAYLNAVVGTALIKKYPKLESEFVYGDYKVYDVRKMIAKSEQEIGKATAKYFFYSNIMNFFKTEITLANGEIRKRPLIETNGETGEIVWDKGRDFATVRKVLSMPQVNIVKKTEVQTGGFSKESILPKRNSDKLIARKKDWDPKKYGGFDSPTVAYSVLVVAKVEKGKSKKLKSVKELLGITIMERSSFEKNPIDFLEAKGYKEVKKDLIIKLPKYSLFELENGRKRMLASAGELQKGNELALPSKYVNFLYLASHYEKLKGSPEDNEQKQLFVEQHKHYLDEIIEQISEFSKRVILADANLDKVLSAYNKHRDKPIREQAENIIHLFTLTNLGAPAAFKYFDTTIDRKRYTSTKEVLDATLIHQSITGLYETRIDLSQLGGDSGGSGGSGGSTNLSDIIEKETGKQLVIQESILMLPEEVEEVIGNKPESDILVHTAYDESTDENVMLLTSDAPEYKPWALVIQDSNGENKIKMLSGGSKRTADGSEFEPKKKRKV

SEQ ID NO: 702 - protein, 1699 aa, synthetic construct
MKRTADGSEFESPKKKRKVSSEVEFSHEYWMRHALTLAKRARDERAGPVGAVLVLNNRVIGEGWNRAIGLHDPTAHAEIMALRQGGLVMQNHRLIDATLYVTFEPCVMCAGAMINSRIGRVVFGVRNSKRGAAGSLMNVLNYPGMNHRVEITEGILADECAALLCDFYRMPRHVFNSQKKAQSSINSGGSSGGSSGSETPGTSESATPESSGGSSGGSDKKYSIGLAIGTNSVGWAVITDEYKVPSKKFKVLGNTDRHSIKKNLIGALLFDSGETAEATRLKRTARRRYTRRKNRICYLQEIFSNEMAKVDDSFFHRLEESFLVEEDKKHERHPIFGNIVDEVAYHEKYPTIYHLRKKLVDSTDKADLRLIYLALAHMIKFRGHFLIEGDLNPDNSDVDKLFIQLVQTYNQLFEENPINASGVDAKAILSARLSKSRRLENLIAQLPGEKKNGLFGNLIALSLGLTPNFKSNFDLAEDAKLQLSKDTYDDDLDNLLAQIGDQYADLFLAAKNLSDAILLSDILRVNTEITKAPLSASMIKRYDEHHQDLTLLKALVRQQLPEKYKEIFFDQSKNGYAGYIDGGASQEEFYKFIKPILEKMDGTEELLVKLNREDLLRKQRTFDNGSIPHQIHLGELHAILRRQEDFYPFLKDNREKIEKILTFRIPYYVGPLARGNSRFAWMTRKSEETITPWNFEEVVDKGASAQSFIERMTNFDKNLPNEKVLPKHSLLYEYFTVYNELTKVKYVTEGMRKPAFLSGEQKKAIVDLLFKTNRKVTVKQLKEDYFKKIECFDSVEISGVEDRFNASLGTYHDLLKIIKDKDFLDNEENEDILEDIVLTLTLFEDREMIEERLKTYAHLFDDKVMKQLKRRRYTGWGRLSRKLINGIRDKQSGKTILDFLKSDGFANRNFMQLIHDDSLTFKEDIQKAQVSGQGDSLHEHIANLAGSPAIKKGILQTVKVVDELVKVMGRHKPENIVIEMARENQTTQKGQKNSRERMKRIEEGIKELGSQILKEHPVENTQLQNEKLYLYYLQNGRDMYVDQELDINRLSDYDVDHIVPQSFLKDDSIDNKVLTRSDKNRGKSDNVPSEEVVKKMKNYWRQLLNAKLITQRKFDNLTKAERGGLSELDKAGFIKRQLVETRQITKHVAQILDSRMNTKYDENDKLIREVKVITLKSKLVSDFRKDFQFYKVREINNYHHAHDAYLNAVVGTALIKKYPKLESEFVYGDYKVYDVRKMIAKSEQEIGKATAKYFFYSNIMNFFKTEITLANGEIRKRPLIETNGETGEIVWDKGRDFATVRKVLSMPQVNIVKKTEVQTGGFSKESILPKRNSDKLIARKKDWDPKKYGGFDSPTVAYSVLVVAKVEKGKSKKLKSVKELLGITIMERSSFEKNPIDFLEAKGYKEVKKDLIIKLPKYSLFELENGRKRMLASAGELQKGNELALPSKYVNFLYLASHYEKLKGSPEDNEQKQLFVEQHKHYLDEIIEQISEFSKRVILADANLDKVLSAYNKHRDKPIREQAENIIHLFTLTNLGAPAAFKYFDTTIDRKRYTSTKEVLDATLIHQSITGLYETRIDLSQLGGDSGGSGGSGGSTNLSDIIEKETGKQLVIQESILMLPEEVEEVIGNKPESDILVHTAYDESTDENVMLLTSDAPEYKPWALVIQDSNGENKIKMLSGGSKRTADGSEFEPKKKRKV

SEQ ID NO: 703 - protein, 1699 aa, synthetic construct
MKRTADGSEFESPKKKRKVSSEVEFSHEYWMRHALTLAKRARDEGAGPVGAVLVLNNRVIGEGWNRAIGLHDPTAHAEIMALRQGGLVMQNYRLFDATLYVTFEPCVMCAGAMINSRIGRVVFGWRNSKRGAAGSLMNVLNYPGMNHRVEITEGILADECAALLCDFYRMPRQVFNSQKKAQSSINSGGSSGGSSGSETPGTSESATPESSGGSSGGSDKKYSIGLAIGTNSVGWAVITDEYKVPSKKFKVLGNTDRHSIKKNLIGALLFDSGETAEATRLKRTARRRYTRRKNRICYLQEIFSNEMAKVDDSFFHRLEESFLVEEDKKHERHPIFGNIVDEVAYHEKYPTIYHLRKKLVDSTDKADLRLIYLALAHMIKFRGHFLIEGDLNPDNSDVDKLFIQLVQTYNQLFEENPINASGVDAKAILSARLSKSRRLENLIAQLPGEKKNGLFGNLIALSLGLTPNFKSNFDLAEDAKLQLSKDTYDDDLDNLLAQIGDQYADLFLAAKNLSDAILLSDILRVNTEITKAPLSASMIKRYDEHHQDLTLLKALVRQQLPEKYKEIFFDQSKNGYAGYIDGGASQEEFYKFIKPILEKMDGTEELLVKLNREDLLRKQRTFDNGSIPHQIHLGELHAILRRQEDFYPFLKDNREKIEKILTFRIPYYVGPLARGNSRFAWMTRKSEETITPWNFEEVVDKGASAQSFIERMTNFDKNLPNEKVLPKHSLLYEYFTVYNELTKVKYVTEGMRKPAFLSGEQKKAIVDLLFKTNRKVTVKQLKEDYFKKIECFDSVEISGVEDRFNASLGTYHDLLKIIKDKDFLDNEENEDILEDIVLTLTLFEDREMIEERLKTYAHLFDDKVMKQLKRRRYTGWGRLSRKLINGIRDKQSGKTILDFLKSDGFANRNFMQLIHDDSLTFKEDIQKAQVSGQGDSLHEHIANLAGSPAIKKGILQTVKVVDELVKVMGRHKPENIVIEMARENQTTQKGQKNSRERMKRIEEGIKELGSQILKEHPVENTQLQNEKLYLYYLQNGRDMYVDQELDINRLSDYDVDHIVPQSFLKDDSIDNKVLTRSDKNRGKSDNVPSEEVVKKMKNYWRQLLNAKLITQRKFDNLTKAERGGLSELDKAGFIKRQLVETRQITKHVAQILDSRMNTKYDENDKLIREVKVITLKSKLVSDFRKDFQFYKVREINNYHHAHDAYLNAVVGTALIKKYPKLESEFVYGDYKVYDVRKMIAKSEQEIGKATAKYFFYSNIMNFFKTEITLANGEIRKRPLIETNGETGEIVWDKGRDFATVRKVLSMPQVNIVKKTEVQTGGFSKESILPKRNSDKLIARKKDWDPKKYGGFDSPTVAYSVLVVAKVEKGKSKKLKSVKELLGITIMERSSFEKNPIDFLEAKGYKEVKKDLIIKLPKYSLFELENGRKRMLASAGELQKGNELALPSKYVNFLYLASHYEKLKGSPEDNEQKQLFVEQHKHYLDEIIEQISEFSKRVILADANLDKVLSAYNKHRDKPIREQAENIIHLFTLTNLGAPAAFKYFDTTIDRKRYTSTKEVLDATLIHQSITGLYETRIDLSQLGGDSGGSGGSGGSTNLSDIIEKETGKQLVIQESILMLPEEVEEVIGNKPESDILVHTAYDESTDENVMLLTSDAPEYKPWALVIQDSNGENKIKMLSGGSKRTADGSEFEPKKKRKV

SEQ ID NO: 704 - protein, 1699 aa, synthetic construct
MKRTADGSEFESPKKKRKVSSEVEFSHEYWMRHALTLAKRARDERKAPVGAVLVLNNRVIGEGWNRAIGLHDPTAHAEIIALRQGGLVMQNYRLIDATLYVTFEPCVMCAGAMINSRIGRVVFGWRNSKRGAAGSLMNVLNYPGMNHRVEITEGILADECAALLCDFYRMPRQVFNAQKKAQSSINSGGSSGGSSGSETPGTSESATPESSGGSSGGSDKKYSIGLAIGTNSVGWAVITDEYKVPSKKFKVLGNTDRHSIKKNLIGALLFDSGETAEATRLKRTARRRYTRRKNRICYLQEIFSNEMAKVDDSFFHRLEESFLVEEDKKHERHPIFGNIVDEVAYHEKYPTIYHLRKKLVDSTDKADLRLIYLALAHMIKFRGHFLIEGDLNPDNSDVDKLFIQLVQTYNQLFEENPINASGVDAKAILSARLSKSRRLENLIAQLPGEKKNGLFGNLIALSLGLTPNFKSNFDLAEDAKLQLSKDTYDDDLDNLLAQIGDQYADLFLAAKNLSDAILLSDILRVNTEITKAPLSASMIKRYDEHHQDLTLLKALVRQQLPEKYKEIFFDQSKNGYAGYIDGGASQEEFYKFIKPILEKMDGTEELLVKLNREDLLRKQRTFDNGSIPHQIHLGELHAILRRQEDFYPFLKDNREKIEKILTFRIPYYVGPLARGNSRFAWMTRKSEETITPWNFEEVVDKGASAQSFIERMTNFDKNLPNEKVLPKHSLLYEYFTVYNELTKVKYVTEGMRKPAFLSGEQKKAIVDLLFKTNRKVTVKQLKEDYFKKIECFDSVEISGVEDRFNASLGTYHDLLKIIKDKDFLDNEENEDILEDIVLTLTLFEDREMIEERLKTYAHLFDDKVMKQLKRRRYTGWGRLSRKLINGIRDKQSGKTILDFLKSDGFANRNFMQLIHDDSLTFKEDIQKAQVSGQGDSLHEHIANLAGSPAIKKGILQTVKVVDELVKVMGRHKPENIVIEMARENQTTQKGQKNSRERMKRIEEGIKELGSQILKEHPVENTQLQNEKLYLYYLQNGRDMYVDQELDINRLSDYDVDHIVPQSFLKDDSIDNKVLTRSDKNRGKSDNVPSEEVVKKMKNYWRQLLNAKLITQRKFDNLTKAERGGLSELDKAGFIKRQLVETRQITKHVAQILDSRMNTKYDENDKLIREVKVITLKSKLVSDFRKDFQFYKVREINNYHHAHDAYLNAVVGTALIKKYPKLESEFVYGDYKVYDVRKMIAKSEQEIGKATAKYFFYSNIMNFFKTEITLANGEIRKRPLIETNGETGEIVWDKGRDFATVRKVLSMPQVNIVKKTEVQTGGFSKESILPKRNSDKLIARKKDWDPKKYGGFDSPTVAYSVLVVAKVEKGKSKKLKSVKELLGITIMERSSFEKNPIDFLEAKGYKEVKKDLIIKLPKYSLFELENGRKRMLASAGELQKGNELALPSKYVNFLYLASHYEKLKGSPEDNEQKQLFVEQHKHYLDEIIEQISEFSKRVILADANLDKVLSAYNKHRDKPIREQAENIIHLFTLTNLGAPAAFKYFDTTIDRKRYTSTKEVLDATLIHQSITGLYETRIDLSQLGGDSGGSGGSGGSTNLSDIIEKETGKQLVIQESILMLPEEVEEVIGNKPESDILVHTAYDESTDENVMLLTSDAPEYKPWALVIQDSNGENKIKMLSGGSKRTADGSEFEPKKKRKV

SEQ ID NO: 705 - protein, 1699 aa, synthetic construct
MKRTADGSEFESPKKKRKVSSEVEFSHEYWMRHALTLAKRARDEGEAPVGAVLVLNNRVIGEGWNRRIGLHDPTAHAEIMALRQGGLVMQNSRLIDATLYVTFEPCVMCAGAMINSRIGRVVFGVRNSKRGAAGSLMNVLNYPGMNHRVEITEGILADECAALLCDFYRMPRQVFNAQKKAQSSINSGGSSGGSSGSETPGTSESATPESSGGSSGGSDKKYSIGLAIGTNSVGWAVITDEYKVPSKKFKVLGNTDRHSIKKNLIGALLFDSGETAEATRLKRTARRRYTRRKNRICYLQEIFSNEMAKVDDSFFHRLEESFLVEEDKKHERHPIFGNIVDEVAYHEKYPTIYHLRKKLVDSTDKADLRLIYLALAHMIKFRGHFLIEGDLNPDNSDVDKLFIQLVQTYNQLFEENPINASGVDAKAILSARLSKSRRLENLIAQLPGEKKNGLFGNLIALSLGLTPNFKSNFDLAEDAKLQLSKDTYDDDLDNLLAQIGDQYADLFLAAKNLSDAILLSDILRVNTEITKAPLSASMIKRYDEHHQDLTLLKALVRQQLPEKYKEIFFDQSKNGYAGYIDGGASQEEFYKFIKPILEKMDGTEELLVKLNREDLLRKQRTFDNGSIPHQIHLGELHAILRRQEDFYPFLKDNREKIEKILTFRIPYYVGPLARGNSRFAWMTRKSEETITPWNFEEVVDKGASAQSFIERMTNFDKNLPNEKVLPKHSLLYEYFTVYNELTKVKYVTEGMRKPAFLSGEQKKAIVDLLFKTNRKVTVKQLKEDYFKKIECFDSVEISGVEDRFNASLGTYHDLLKIIKDKDFLDNEENEDILEDIVLTLTLFEDREMIEERLKTYAHLFDDKVMKQLKRRRYTGWGRLSRKLINGIRDKQSGKTILDFLKSDGFANRNFMQLIHDDSLTFKEDIQKAQVSGQGDSLHEHIANLAGSPAIKKGILQTVKVVDELVKVMGRHKPENIVIEMARENQTTQKGQKNSRERMKRIEEGIKELGSQILKEHPVENTQLQNEKLYLYYLQNGRDMYVDQELDINRLSDYDVDHIVPQSFLKDDSIDNKVLTRSDKNRGKSDNVPSEEVVKKMKNYWRQLLNAKLITQRKFDNLTKAERGGLSELDKAGFIKRQLVETRQITKHVAQILDSRMNTKYDENDKLIREVKVITLKSKLVSDFRKDFQFYKVREINNYHHAHDAYLNAVVGTALIKKYPKLESEFVYGDYKVYDVRKMIAKSEQEIGKATAKYFFYSNIMNFFKTEITLANGEIRKRPLIETNGETGEIVWDKGRDFATVRKVLSMPQVNIVKKTEVQTGGFSKESILPKRNSDKLIARKKDWDPKKYGGFDSPTVAYSVLVVAKVEKGKSKKLKSVKELLGITIMERSSFEKNPIDFLEAKGYKEVKKDLIIKLPKYSLFELENGRKRMLASAGELQKGNELALPSKYVNFLYLASHYEKLKGSPEDNEQKQLFVEQHKHYLDEIIEQISEFSKRVILADANLDKVLSAYNKHRDKPIREQAENIIHLFTLTNLGAPAAFKYFDTTIDRKRYTSTKEVLDATLIHQSITGLYETRIDLSQLGGDSGGSGGSGGSTNLSDIIEKETGKQLVIQESILMLPEEVEEVIGNKPESDILVHTAYDESTDENVMLLTSDAPEYKPWALVIQDSNGENKIKMLSGGSKRTADGSEFEPKKKRKV

SEQ ID NO: 706 - protein, 1699 aa, synthetic construct
MKRTADGSEFESPKKKRKVSSEVEFSHEYWMRHALTLAKRARDEGEGPVGAVLVLNNRVIGEGWNRRIGLHDPTAHAEIMALRQGGLVMQNCKLIDATLYVTFEPCVMCAGAMIHSRIGRVVFGVRNSKRGAAGSLMNVLNYPGMNHRVEITEGILADECAALLCDFYRMPRQVFNAQKKAQSSINSGGSSGGSSGSETPGTSESATPESSGGSSGGSDKKYSIGLAIGTNSVGWAVITDEYKVPSKKFKVLGNTDRHSIKKNLIGALLFDSGETAEATRLKRTARRRYTRRKNRICYLQEIFSNEMAKVDDSFFHRLEESFLVEEDKKHERHPIFGNIVDEVAYHEKYPTIYHLRKKLVDSTDKADLRLIYLALAHMIKFRGHFLIEGDLNPDNSDVDKLFIQLVQTYNQLFEENPINASGVDAKAILSARLSKSRRLENLIAQLPGEKKNGLFGNLIALSLGLTPNFKSNFDLAEDAKLQLSKDTYDDDLDNLLAQIGDQYADLFLAAKNLSDAILLSDILRVNTEITKAPLSASMIKRYDEHHQDLTLLKALVRQQLPEKYKEIFFDQSKNGYAGYIDGGASQEEFYKFIKPILEKMDGTEELLVKLNREDLLRKQRTFDNGSIPHQIHLGELHAILRRQEDFYPFLKDNREKIEKILTFRIPYYVGPLARGNSRFAWMTRKSEETITPWNFEEVVDKGASAQSFIERMTNFDKNLPNEKVLPKHSLLYEYFTVYNELTKVKYVTEGMRKPAFLSGEQKKAIVDLLFKTNRKVTVKQLKEDYFKKIECFDSVEISGVEDRFNASLGTYHDLLKIIKDKDFLDNEENEDILEDIVLTLTLFEDREMIEERLKTYAHLFDDKVMKQLKRRRYTGWGRLSRKLINGIRDKQSGKTILDFLKSDGFANRNFMQLIHDDSLTFKEDIQKAQVSGQGDSLHEHIANLAGSPAIKKGILQTVKVVDELVKVMGRHKPENIVIEMARENQTTQKGQKNSRERMKRIEEGIKELGSQILKEHPVENTQLQNEKLYLYYLQNGRDMYVDQELDINRLSDYDVDHIVPQSFLKDDSIDNKVLTRSDKNRGKSDNVPSEEVVKKMKNYWRQLLNAKLITQRKFDNLTKAERGGLSELDKAGFIKRQLVETRQITKHVAQILDSRMNTKYDENDKLIREVKVITLKSKLVSDFRKDFQFYKVREINNYHHAHDAYLNAVVGTALIKKYPKLESEFVYGDYKVYDVRKMIAKSEQEIGKATAKYFFYSNIMNFFKTEITLANGEIRKRPLIETNGETGEIVWDKGRDFATVRKVLSMPQVNIVKKTEVQTGGFSKESILPKRNSDKLIARKKDWDPKKYGGFDSPTVAYSVLVVAKVEKGKSKKLKSVKELLGITIMERSSFEKNPIDFLEAKGYKEVKKDLIIKLPKYSLFELENGRKRMLASAGELQKGNELALPSKYVNFLYLASHYEKLKGSPEDNEQKQLFVEQHKHYLDEIIEQISEFSKRVILADANLDKVLSAYNKHRDKPIREQAENIIHLFTLTNLGAPAAFKYFDTTIDRKRYTSTKEVLDATLIHQSITGLYETRIDLSQLGGDSGGSGGSGGSTNLSDIIEKETGKQLVIQESILMLPEEVEEVIGNKPESDILVHTAYDESTDENVMLLTSDAPEYKPWALVIQDSNGENKIKMLSGGSKRTADGSEFEPKKKRKV

SEQ ID NO: 707 - protein, 1505 aa, synthetic construct
MKRTADGSEFESPKKKRKVSSEVEFSHEYWMRHALTLAKRARDEGAGPVGAVLVLNNRVIGEGWNRAIGLHDPTAHAEIMALRQGGLVMQNYRLFDATLYVTFEPCVMCAGAMINSRIGRVVFGVRNSKRGAAGSLMNVLNYPGMNHRVEITEGILADECAALLCDFYRMPRQVFNSQKKAQSSINSGGSSGGSSGSETPGTSESATPESSGGSSGGSAAFKPNPINYILGLAIGIASVGWAMVEIDEEGNPIRLIDLGVRVFERAEVPKTGDSLAMARRLARSVRRLTRRRAHRLLRARRLLKREGVLQAADFDENGLITSLPNTPWQLRAAALDRKLTPLEWSAVLLHLIKHRGYLSQRKNEGETAAKELGALLKGVANNAHALQTGDFRTPAELALNKFEKESGHIRNQRGDYSHTFSRKDLQAELILLFEKQKEFGNPHVSGGLKEGIETLLMTQRPALSGDAVQKMLGHCTLEPTEPKAAKNTYTAERFIWLTKLNNLRILEQGSERPLTDTERSTLMDEPYRKSKLTYAQARKLLGLEDTAFFKGLRYGKDNAEASTLMEMKAYHAISRALEKEGLKDKKSPLNLSSELQDEIGTAFSLFKTDEDITGRLKDRVQPEILEALLKHISFDKFVQISLKALRRIVPLMEQGKRYDEACAEIYGVHYGKKNTEEKIYLPPIPADEIRNPVVLRALSQARKVINGVVRRYGSPARIHIETAREVGKSFKDRKEIAKRQEENRKDREKAAAKFREYFPNFVGEPKSKDILKLRLYEQQHGKCLYSGKEINLVRLNEKGYVEIDHALPFSRTWDDSFNNKVLVLGSENQNKGNQTPYEYFNGKDNSREWQEFKARVETSRFPSSKKQRILLQKFDEDGFKECNLNDTRYVNRFLCQFVADHILLTGKGKRRVVASNGQITNLLRGFWRLRKVRAENDRHHALDAVVVACSTVAMQQKITRFVRYKEMNAFDGKTVDKETGKVLYQKTHFPQPWEFFAQEVMIRVFGKPDGKPEFEEADTPEKLRTLLAEKLSSRPEAVHEYVTPLFVSRAPNRKMSGAHKDTLRSAKRFVKHNEKISVKRVWLTEIKLADLENMVNYKNGREIELYEALKARLEAYGGNAKQAFDPKDNPFYKKGGQLVKAVRVEKTQKSGVLLNKKNAYTIADNGDMVRVDVFCKVDKKGKNQYFIVPIYAWQVAENILPDIDCKGYRIDDSYTFCFSLHKYDLIAFQKDEKSKVEFAYYINCDSSSGGFYLAWHDKGSREQRFRISTQNLALIQKYQVNELGKEIRPCRLKKRPPVSGGSGGSGGSTNLSDIIEKETGKQLVIQESILMLPEEVEEVIGNKPESDILVHTAYDESTDENVMLLTSDAPEYKPWALVIQDSNGENKIKMLSGGSGGSGGSTNLSDIIEKETGKQLVIQESILMLPEEVEEVIGNKPESDILVHTAYDESTDENVMLLTSDAPEYKPWALVIQDSNGENKIKMLSGGSKRTADGSEFEPKKKRKV

SEQ ID NO: 708 - protein, 1478 aa, synthetic construct
MKRTADGSEFESPKKKRKVSSEVEFSHEYWMRHALTLAKRARDEGAGPVGAVLVLNNRVIGEGWNRAIGLHDPTAHAEIMALRQGGLVMQNYRLFDATLYVTFEPCVMCAGAMINSRIGRVVFGVRNSKRGAAGSLMNVLNYPGMNHRVEITEGILADECAALLCDFYRMPRQVFNSQKKAQSSINSGGSSGGSSGSETPGTSESATPESSGGSSGGSGKRNYILGLAIGITSVGYGIIDYETRDVIDAGVRLFKEANVENNEGRRSKRGARRLKRRRRHRIQRVKKLLFDYNLLTDHSELSGINPYEARVKGLSQKLSEEEFSAALLHLAKRRGVHNVNEVEEDTGNELSTKEQISRNSKALEEKYVAELQLERLKKDGEVRGSINRFKTSDYVKEAKQLLKVQKAYHQLDQSFIDTYIDLLETRRTYYEGPGEGSPFGWKDIKEWYEMLMGHCTYFPEELRSVKYAYNADLYNALNDLNNLVITRDENEKLEYYEKFQIIENVFKQKKKPTLKQIAKEILVNEEDIKGYRVTSTGKPEFTNLKVYHDIKDITARKEIIENAELLDQIAKILTIYQSSEDIQEELTNLNSELTQEEIEQISNLKGYTGTHNLSLKAINLILDELWHTNDNQIAIFNRLKLVPKKVDLSQQKEIPTTLVDDFILSPVVKRSFIQSIKVINAIIKKYGLPNDIIIELAREKNSKDAQKMINEMQKRNRQTNERIEEIIRTTGKENAKYLIEKIKLHDMQEGKCLYSLEAIPLEDLLNNPFNYEVDHIIPRSVSFDNSFNNKVLVKQEENSKKGNRTPFQYLSSSDSKISYETFKKHILNLAKGKGRISKTKKEYLLEERDINRFSVQKDFINRNLVDTRYATRGLMNLLRSYFRVNNLDVKVKSINGGFTSFLRRKWKFKKERNKGYKHHAEDALIIANADFIFKEWKKLDKAKKVMENQMFEEKQAESMPEIETEQEYKEIFITPHQIKHIKDFKDYKYSHRVDKKPNRELINDTLYSTRKDDKGNTLIVNNLNGLYDKDNDKLKKLINKSPEKLLMYHHDPQTYQKLKLIMEQYGDEKNPLYKYYEETGNYLTKYSKKDNGPVIKKIKYYGNKLNAHLDITDDYPNSRNKVVKLSLKPYRFDVYLDNGVYKFVTVKNLDVIKKENYYEVNSKCYEEAKKLKKISNQAEFIASFYNNDLIKINGELYRVIGVNNDLLNRIEVNMIDITYREYLENMNDKRPPRIIKTIASKTQSIKKYSTDILGNLYEVKSKKHPQIIKKGSGGSGGSGGSTNLSDIIEKETGKQLVIQESILMLPEEVEEVIGNKPESDILVHTAYDESTDENVMLLTSDAPEYKPWALVIQDSNGENKIKMLSGGSGGSGGSTNLSDIIEKETGKQLVIQESILMLPEEVEEVIGNKPESDILVHTAYDESTDENVMLLTSDAPEYKPWALVIQDSNGENKIKMLSGGSKRTADGSEFEPKKKRKV

SEQ ID NO: 709 - protein, 1792 aa, synthetic construct
MKRTADGSEFESPKKKRKVSSEVEFSHEYWMRHALTLAKRARDEGAGPVGAVLVLNNRVIGEGWNRAIGLHDPTAHAEIMALRQGGLVMQNYRLFDATLYVTFEPCVMCAGAMINSRIGRVVFGVRNSKRGAAGSLMNVLNYPGMNHRVEITEGILADECAALLCDFYRMPRQVFNSQKKAQSSINSGGSSGGSSGSETPGTSESATPESSGGSSGGSDKKYSIGLAIGTNSVGWAVITDEYKVPSKKFKVLGNTDRHSIKKNLIGALLFDSGETAEATRLKRTARRRYTRRKNRICYLQEIFSNEMAKVDDSFFHRLEESFLVEEDKKHERHPIFGNIVDEVAYHEKYPTIYHLRKKLVDSTDKADLRLIYLALAHMIKFRGHFLIEGDLNPDNSDVDKLFIQLVQTYNQLFEENPINASGVDAKAILSARLSKSRRLENLIAQLPGEKKNGLFGNLIALSLGLTPNFKSNFDLAEDAKLQLSKDTYDDDLDNLLAQIGDQYADLFLAAKNLSDAILLSDILRVNTEITKAPLSASMIKRYDEHHQDLTLLKALVRQQLPEKYKEIFFDQSKNGYAGYIDGGASQEEFYKFIKPILEKMDGTEELLVKLNREDLLRKQRTFDNGSIPHQIHLGELHAILRRQEDFYPFLKDNREKIEKILTFRIPYYVGPLARGNSRFAWMTRKSEETITPWNFEEVVDKGASAQSFIERMTNFDKNLPNEKVLPKHSLLYEYFTVYNELTKVKYVTEGMRKPAFLSGEQKKAIVDLLFKTNRKVTVKQLKEDYFKKIECFDSVEISGVEDRFNASLGTYHDLLKIIKDKDFLDNEENEDILEDIVLTLTLFEDREMIEERLKTYAHLFDDKVMKQLKRRRYTGWGRLSRKLINGIRDKQSGKTILDFLKSDGFANRNFMQLIHDDSLTFKEDIQKAQVSGQGDSLHEHIANLAGSPAIKKGILQTVKVVDELVKVMGRHKPENIVIEMARENQTTQKGQKNSRERMKRIEEGIKELGSQILKEHPVENTQLQNEKLYLYYLQNGRDMYVDQELDINRLSDYDVDHIVPQSFLKDDSIDNKVLTRSDKNRGKSDNVPSEEVVKKMKNYWRQLLNAKLITQRKFDNLTKAERGGLSELDKAGFIKRQLVETRQITKHVAQILDSRMNTKYDENDKLIREVKVITLKSKLVSDFRKDFQFYKVREINNYHHAHDAYLNAVVGTALIKKYPKLESEFVYGDYKVYDVRKMIAKSEQEIGKATAKYFFYSNIMNFFKTEITLANGEIRKRPLIETNGETGEIVWDKGRDFATVRKVLSMPQVNIVKKTEVQTGGFSKESIRPKRNSDKLIARKKDWDPKKYGGFVSPTVAYSVLVVAKVEKGKSKKLKSVKELLGITIMERSSFEKNPIDFLEAKGYKEVKKDLIIKLPKYSLFELENGRKRMLASARFLQKGNELALPSKYVNFLYLASHYEKLKGSPEDNEQKQLFVEQHKHYLDEIIEQISEFSKRVILADANLDKVLSAYNKHRDKPIREQAENIIHLFTLTNLGAPRAFKYFDTTIDRKVYRSTKEVLDATLIHQSITGLYETRIDLSQLGGDSGGSGGSGGSTNLSDIIEKETGKQLVIQESILMLPEEVEEVIGNKPESDILVHTAYDESTDENVMLLTSDAPEYKPWALVIQDSNGENKIKMLSGGSGGSGGSTNLSDIIEKETGKQLVIQESILMLPEEVEEVIGNKPESDILVHTAYDESTDENVMLLTSDAPEYKPWALVIQDSNGENKIKMLSGGSKRTADGSEFEPKKKRKV

SEQ ID NO: 710 - protein, 1315 aa, synthetic construct
MKRTADGSEFESPKKKRKVSSEVEFSHEYWMRHALTLAKRARDEGAGPVGAVLVLNNRVIGEGWNRAIGLHDPTAHAEIMALRQGGLVMQNYRLFDATLYVTFEPCVMCAGAMINSRIGRVVFGVRNSKRGAAGSLMNVLNYPGMNHRVEITEGILADECAALLCDFYRMPRQVFNSQKKAQSSINSGGSSGGSSGSETPGTSESATPESSGGSSGGSARILAFAIGISSIGWAFSENDELKDCGVRIFTKVENPKTGESLALPRRLARSARKRYARRKARLNHLKHLIANEFKLNYEDYQSFDESLAKAYKGSLISPYELRFRALNELLSKQDFARVILHIAKRRGYDDIKNSDDKEKGAILKAIKQNEEKLANYQSVGEYLYKEYFQKFKENSKEFTNVRNKKESYERCIAQSFLKDELKLIFKKQREFGFSFSKKFEEEVLSVAFYKRALKDFSHLVGNCSFFTDEKRAPKNSPLAFMFVALTRIINLLNNLKNTEGILYTKDDLNALLNEVLKNGTLTYKQTKKLLGLSDDYEFKGEKGTYFIEFKKYKEFIKALGEHNLSQDDLNEIAKDITLIKDEIKLKKALAKYDLNQNQIDSLSKLEFKDHLNISFKALKLVTPLMLEGKKYDEACNELNLKVAINEDKKDFLPAFNETYYKDEVTNPVVLRAIKEYRKVLNALLKKYGKVHKINIELAREVGKNHSQRAKIEKEQNENYKAKKDAELECEKLGLKINSKNILKLRLFKEQKEFCAYSGEKIKISDLQDEKMLEIDHIYPYSRSFDDSYMNKVLVFTKQNQEKLNQTPFEAFGNDSAKWQKIEVLAKNLPTKKQKRILDKNYKDKEQKNFKDRNLNDTRYIARLVLNYTKDYLDFLPLSDDENTKLNDTQKGSKVHVEAKSGMLTSALRHTWGFSAKDRNNHLHHAIDAVIIAYANNSIVKAFSDFKKEQESNSAELYAKKISELDYKNKRKFFEPFSGFRQKVLDKIDEIFVSKPERKKPSGALHEETFRKEEEFYQSYGGKEGVLKALELGKIRKVNGKIVKNGDMFRVDIFKHKKTNKFYAVPIYTMDFALKVLPNKAVARSKKGEIKDWILMDENYEFCFSLYKDSLILIQTKKMQEPEFVYYNAFTSSTVSLIVSKHDNKFETLSKNQKILFKNANEKEVIAKSIGIQNLKVFEKYIVSALGEVTKAEFRQREDFKKSGGSGGSGGSTNLSDIIEKETGKQLVIQESILMLPEEVEEVIGNKPESDILVHTAYDESTDENVMLLTSDAPEYKPWALVIQDSNGENKIKMLSGGSKRTADGSEFEPKKKRKV

SEQ ID NO: 711 - DNA, 7917 bp, synthetic construct
  source 1..7917: mol_type = other DNA
tagttattaatagtaatcaattacggggtcattagttcatagcccatatatggagttccgcgttacataacttacggtaaatggcccgcctggctgaccgcccaacgacccccgcccattgacgtcaataatgacgtatgttcccatagtaacgccaatagggactttccattgacgtcaatgggtggagtatttacggtaaactgcccacttggcagtacatcaagtgtatcatatgccaagtacgccccctattgacgtcaatgacggtaaatggcccgcctggcattatgcccagtacatgaccttatgggactttcctacttggcagtacatctacgtattagtcatcgctattaccatggtgatgcggttttggcagtacatcaatgggcgtggatagcggtttgactcacggggatttccaagtctccaccccattgacgtcaatgggagtttgttttggcaccaaaatcaacgggactttccaaaatgtcgtaacaactccgccccattgacgcaaatgggcggtaggcgtgtacggtgggaggtctatataagcagagctggtttagtgaaccgtcagatccgctagagatccgcggccgctaatacgactcactatagggagagccgccaccatgaaacggacagccgacggaagcgagttcgagtcaccaaagaagaagcggaaagtcagttctgaggtggagttttcccacgagtactggatgagacatgccctgaccctggccaagagggcacgggatgagggggcgggtcctgtgggagccgtgctggtgctgaacaatagagtgatcggcgagggctggaacagagccatcggcctgcacgacccaacagcccatgccgaaattatggccctgagacagggcggcctggtcatgcagaactacagactgtttgacgccaccctgtacgtgacattcgagccttgcgtgatgtgcgccggcgccatgatcaactctaggatcggccgcgtggtgtttggcgtgaggaactcaaaaagaggcgccgcaggctccctgatgaacgtgctgaactaccccggcatgaatcaccgcgtcgaaattaccgagggaatcctggcagatgaatgtgccgccctgctgtgcgatttctatcggatgcctagacaggtgttcaattctcagaagaaggcccagagctccatcaactctggcggatctagcggaggatcctctggcagcgagacaccaggaacaagcgagtcagcaacaccagagagcagtggcggcagcagcggcggcagcgcagcattcaagcctaacccaatcaattacatcctgggactggcaatcggaatcgcatccgtgggatgggctatggtggagatcgacgaggaggggaatcctatccggctgatcgatctgggcgtgagagtgtttgagagggccgaggtgccaaagaccggcgattctctggctatggcccggagactggcacggagcgtgaggcgcctgacacggagaagggcacacaggctgctgagggcacgccggctgctgaagagagagggcgtgctgcaggcagcagacttcgatgagaatggcctgatcacgagcttgccaaacaccccctggcagctgagagcagccgccctggacaggaagctgacaccactggagtggtctgccgtgctgctgcacctgatcaagcaccgcggctacctgagccagcggaagaacgagggagagacagcagccaaggagctgggcgccctgctgaagggagtggccaacaatgcccacgccctgcagaccggcgatttcaggacacctgccgagctggccctgaataagtttgagaaggagtccggccacatcagaaaccagaggggcgactatagccacaccttctcccgcaaggatctgcaggccgagctgatcctgctgttcgagaagcagaaggagtttggcaatccacacgtgagcggaggcctgaaggagggaatcgagaccctgctgatgacacagaggcctgccctgtccggcgacgcagtgcagaagatgctggggcactgcaccctcgagcctacagagccaaaggccgccaagaacacctacacagccgagcggtttatctggctgacaaagctgaacaatctgagaatcctggagcagggatccgagaggccactgaccgacacagagaggtccaccctgatggatgagccttaccggaagtctaaactgacatatgcccaggccagaaagctgctgggcctggaggacaccgccttctttaagggcctgagatacggcaaggataatgccgaggcctccacactgatggagatgaaggcctatcacgccatctctcgcgccctggagaaggagggcctgaaggacaagaagtcccccctgaacctgagctccgagctgcaggatgagatcggcaccgccttctctctgtttaagaccgacgaggatatcacaggccgcctgaaggacagggtgcagcctgagatcctggaggccctgctgaagcacatctctttcgataagtttgtgcagatcagcctgaaggccctgagaaggatcgtgccactgatggagcagggcaagcggtacgacgaggcctgcgccgagatctacggcgttcactatggcaagaagaacacagaggagaagatctatctgccccctatccctgccgacgagatcagaaatcctgtggtgctgagggccctgtcccaggcaagaaaagtgatcaacggagtggtgcgccggtacggatctccagcccggatccacatcgagaccgccagagaagtgggcaagagcttcaaggaccggaaggagatcgcgaagagacaggaggagaatcgcaaggatcgggagaaggccgccgccaagtttagggagtacttccctaactttgtgggcgagccaaagtctaaggacatcctgaagctgcgcctgtacgagcagcagcacggcaagtgtctgtatagcggcaaagagatcaatctggtgcggctgaacgagaagggctatgtggagatcgatcacgccctgcctttctccagaacctgggacgattcttttaacaataaggtgctggtgctgggcagcgagaaccagaataagggcaatcagacaccatacgagtatttcaatggcaaggacaactccagggagtggcaggagttcaaggcccgcgtggagacctctagatttcccagtagcaagaagcagcggatcctgctgcagaagttcgacgaggatggctttaaggagtgcaacctgaatgacaccagatacgtgaaccggttcctgtgccagtttgtggccgatcacatcctgctgaccggcaagggcaagagaagggtggtcgcctctaatggccagatcacaaacctgctgagggggttttggagactgaggaaggtgcgggcagagaatgacagacaccacgcactggatgcagtggtggtggcatgcagcaccgtggcaatgcagcagaagatcacaagattcgtgaggtataaggagatgaacgcctttgacggcaagaccgtcgataaggagacaggcaaggtgctgtaccagaagacccacttcccccagccttgggagttctttgcccaggaagttatgatccgggtgttcggcaagccagacggcaagcctgagtttgaggaggccgataccccagagaagctgaggacactgctggcagagaagctgtctagcaggccagaggcagtgcacgagtacgtgaccccgctgttcgtgtccagggcacccaatcggaagatgtctggcgcccacaaggacacactgagaagcgccaagaggtttgtgaagcacaacgagaagatctccgtgaagagagtgtggctgaccgagatcaagctggccgatctggagaacatggtgaattacaagaacggcagggagatcgagctgtatgaggccctgaaggcaaggctggaggcctacggaggaaatgccaagcaggccttcgacccaaaggataaccccttttataagaagggaggacagctggtgaaggccgtgcgggtggagaagacccagaaaagcggcgtgctgctgaataagaagaacgcctacacaatcgccgacaatggtgatatggtgagagtggacgtgttctgtaaggtggataagaagggcaagaatcagtactttatcgtgcctatctatgcctggcaggtggccgagaacatcctgccagacatcgattgcaagggctacagaatcgacgatagctatacattctgtttttccctgcacaagtatgacctgatcgccttccagaaggatgagaagtccaaggtggagtttgcctactatatcaattgcgactcctctagcggcgggttctacctggcctggcacgataagggcagcagggagcagcggtttcgcatctccacccagaatctggcgctgatccagaagtatcaggtgaacgagctgggcaaggagatcaggccatgtcggctgaagaagcgcccacccgtgagcggcgggagcggcgggagcggggggagcactaatctgagcgacatcattgagaaggagactgggaaacagctggtcattcaggagtccatcctgatgctgcctgaggaggtggaggaagtgatcggcaacaagccagagtctgacatcctggtgcacaccgcctacgacgagtccacagatgagaatgtgatgctgctgacctctgacgcccccgagtataagccttgggccctggtcatccaggattctaacggcgagaataagatcaagatgctgagcggaggatccggaggatctggaggcagcaccaacctgtctgacatcatcgagaaggagacaggcaagcagctggtcatccaggagagcatcctgatgctgcccgaagaagtcgaagaagtgatcggaaacaagcctgagagcgatatcctggtccataccgcctacgacgagagtaccgacgaaaatgtgatgctgctgacatccgacgccccagagtataagccctgggctctggtcatccaggattccaacggagagaacaaaatcaaaatgctgtctggcggctcaaaaagaaccgccgacggcagcgaattcgagcccaagaagaagaggaaagtctaaccggtcatcatcaccatcaccattgagtttaaacccgctgatcagcctcgactgtgccttctagttgccagccatctgttgtttgcccctcccccgtgccttccttgaccctggaaggtgccactcccactgtcctttcctaataaaatgaggaaattgcatcgcattgtctgagtaggtgtcattctattctggggggtggggtggggcaggacagcaagggggaggattgggaagacaatagcaggcatgctggggatgcggtgggctctatggcttctgaggcggaaagaaccagctggggctcgataccgtcgacctctagctagagcttggcgtaatcatggtcatagctgtttcctgtgtgaaattgttatccgctcacaattccacacaacatacgagccggaagcataaagtgtaaagcctagggtgcctaatgagtgagctaactcacattaattgcgttgcgctcactgcccgctttccagtcgggaaacctgtcgtgccagctgcattaatgaatcggccaacgcgcggggagaggcggtttgcgtattgggcgcacttccgcttcctcgctcactgactcgctgcgctcggtcgttcggctgcggcgagcggtatcagctcactcaaaggcggtaatacggttatccacagaatcaggggataacgcaggaaagaacatgtgagcaaaaggccagcaaaaggccaggaaccgtaaaaaggccgcgttgctggcgtttttccataggctccgcccccctgacgagcatcacaaaaatcgacgctcaagtcagaggtggcgaaacccgacaggactataaagataccaggcgtttccccctggaagctccctcgtgcgctctcctgttccgaccctgccgcttaccggatacctgtccgcctttctcccttcgggaagcgtggcgctttctcatagctcacgctgtaggtatctcagttcggtgtaggtcgttcgctccaagctgggctgtgtgcacgaaccccccgttcagcccgaccgctgcgccttatccggtaactatcgtcttgagtccaacccggtaagacacgacttatcgccactggcagcagccactggtaacaggattagcagagcgaggtatgtaggcggtgctacagagttcttgaagtggtggcctaactacggctacactagaagaacagtatttggtatctgcgctctgctgaagccagttaccttcggaaaaagagttggtagctcttgatccggcaaacaaaccaccgctggtagcggtggtttttttgtttgcaagcagcagattacgcgcagaaaaaaaggatctcaagaagatcctttgatcttttctacggggtctgacactcagtggaacgaaaactcacgttaagggattttggtcatgagattatcaaaaaggatcttcacctagatccttttaaattaaaaatgaagttttaaatcaatctaaagtatatatgagtaaacttggtctgacagttaccaatgcttaatcagtgaggcacctatctcagcgatctgtctatttcgttcatccatagttgcctgactccccgtcgtgtagataactacgatacgggagggcttaccatctggccccagtgctgcaatgataccgcgggacccacgctcaccggctccagatttatcagcaataaaccagccagccggaagggccgagcgcagaagtggtcctgcaactttatccgcctccatccagtctattaattgttgccgggaagctagagtaagtagttcgccagttaatagtttgcgcaacgttgttgccattgctacaggcatcgtggtgtcacgctcgtcgtttggtatggcttcattcagctccggttcccaacgatcaaggcgagttacatgatcccccatgttgtgcaaaaaagcggttagctccttcggtcctccgatcgttgtcagaagtaagttggccgcagtgttatcactcatggttatggcagcactgcataattctcttactgtcatgccatccgtaagatgcttttctgtgactggtgagtactcaaccaagtcattctgagaatagtgtatgcggcgaccgagttgctcttgcccggcgtcaatacgggataataccgcgccacatagcagaactttaaaagtgctcatcattggaaaacgttcttcggggcgaaaactctcaaggatcttaccgctgttgagatccagttcgatgtaacccactcgtgcacccaactgatcttcagcatcttttactttcaccagcgtttctgggtgagcaaaaacaggaaggcaaaatgccgcaaaaaagggaataagggcgacacggaaatgttgaatactcatactcttcctttttcaatattattgaagcatttatcagggttattgtctcatgagcggatacatatttgaatgtatttagaaaaataaacaaataggggttccgcgcacatttccccgaaaagtgccacctgacgtcgacggatcgggagatcgatctcccgatcccctagggtcgactctcagtacaatctgctctgatgccgcatagttaagccagtatctgctccctgcttgtgtgttggaggtcgctgagtagtgcgcgagcaaaatttaagctacaacaaggcaaggcttgaccgacaattgcatgaagaatctgcttagggttaggcgttttgcgctgcttcgcgatgtacgggccagatatacgcgttgacattgattattgac

SEQ ID NO: 712 - DNA, 7347 bp, synthetic construct
  source 1..7347: mol_type = other DNA
attgatgcagtaatcatagcctacgctaacaacagcatcgtgaaagccttctccgatttcaagaaagaacaggagtctaatagcgccgagttgtacgccaagaaaatttccgaattggactataaaaataagagaaaattcttcgaacccttctccgggtttcgccaaaaggtcttagataagatcgacgagattttcgtttccaagcccgaaagaaaaaagccttcaggggcactgcacgaagagacattccgcaaggaagaggaattttaccaatcttacggtggtaaagagggagttctgaaggctctggagcttgggaagatccgcaaggtaaacgggaaaatcgtgaaaaacggggacatgttcagggtggatatcttcaagcacaaaaagaccaacaagttctacgcagtacccatctacactatggatttcgctttaaaggttctcccaaataaggcggtggctcgatcgaagaaaggagagatcaaggactggatcttaatggatgaaaattacgagttttgcttctcgctctacaaagatagcctgattctgatccagacaaaaaagatgcaggaaccagaatttgtttattataacgccttcacgagcagtacagtgtccctgattgtgagcaagcatgataacaagttcgagactctgtctaagaatcagaaaatccttttcaagaacgccaacgagaaggaggtcatcgcaaagtcaattggcatccaaaacctgaaggtgttcgagaaatacatagtgtccgcactcggtgaagtaactaaagccgaatttcgacagcgcgaggattttaagaaaagcggcgggagcggcgggagcggggggagcactaatctgagcgacatcattgagaaggagactgggaaacagctggtcattcaggagtccatcctgatgctgcctgaggaggtggaggaagtgatcggcaacaagccagagtctgacatcctggtgcacaccgcctacgacgagtccacagatgagaatgtgatgctgctgacctctgacgcccccgagtataagccttgggccctggtcatccaggattctaacggcgagaataagatcaagatgctgagcggaggatccaaaagaaccgccgacggcagcgaattcgagcccaagaagaagaggaaagtctaaccggtcatcatcaccatcaccattgagtttaaacccgctgatcagcctcgactgtgccttctagttgccagccatctgttgtttgcccctcccccgtgccttccttgaccctggaaggtgccactcccactgtcctttcctaataaaatgaggaaattgcatcgcattgtctgagtaggtgtcattctattctggggggtggggtggggcaggacagcaagggggaggattgggaagacaatagcaggcatgctggggatgcggtgggctctatggcttctgaggcggaaagaaccagctggggctcgataccgtcgacctctagctagagcttggcgtaatcatggtcatagctgtttcctgtgtgaaattgttatccgctcacaattccacacaacatacgagccggaagcataaagtgtaaagcctagggtgcctaatgagtgagctaactcacattaattgcgttgcgctcactgcccgctttccagtcgggaaacctgtcgtgccagctgcattaatgaatcggccaacgcgcggggagaggcggtttgcgtattgggcgcacttccgcttcctcgctcactgactcgctgcgctcggtcgttcggctgcggcgagcggtatcagctcactcaaaggcggtaatacggttatccacagaatcaggggataacgcaggaaagaacatgtgagcaaaaggccagcaaaaggccaggaaccgtaaaaaggccgcgttgctggcgtttttccataggctccgcccccctgacgagcatcacaaaaatcgacgctcaagtcagaggtggcgaaacccgacaggactataaagataccaggcgtttccccctggaagctccctcgtgcgctctcctgttccgaccctgccgcttaccggatacctgtccgcctttctcccttcgggaagcgtggcgctttctcatagctcacgctgtaggtatctcagttcggtgtaggtcgttcgctccaagctgggctgtgtgcacgaaccccccgttcagcccgaccgctgcgccttatccggtaactatcgtcttgagtccaacccggtaagacacgacttatcgccactggcagcagccactggtaacaggattagcagagcgaggtatgtaggcggtgctacagagttcttgaagtggtggcctaactacggctacactagaagaacagtatttggtatctgcgctctgctgaagccagttaccttcggaaaaagagttggtagctcttgatccggcaaacaaaccaccgctggtagcggtggtttttttgtttgcaagcagcagattacgcgcagaaaaaaaggatctcaagaagatcctttgatcttttctacggggtctgacactcagtggaacgaaaactcacgttaagggattttggtcatgagattatcaaaaaggatcttcacctagatccttttaaattaaaaatgaagttttaaatcaatctaaagtatatatgagtaaacttggtctgacagttaccaatgcttaatcagtgaggcacctatctcagcgatctgtctatttcgttcatccatagttgcctgactccccgtcgtgtagataactacgatacgggagggcttaccatctggccccagtgctgcaatgataccgcgggacccacgctcaccggctccagatttatcagcaataaaccagccagccggaagggccgagcgcagaagtggtcctgcaactttatccgcctccatccagtctattaattgttgccgggaagctagagtaagtagttcgccagttaatagtttgcgcaacgttgttgccattgctacaggcatcgtggtgtcacgctcgtcgtttggtatggcttcattcagctccggttcccaacgatcaaggcgagttacatgatcccccatgttgtgcaaaaaagcggttagctccttcggtcctccgatcgttgtcagaagtaagttggccgcagtgttatcactcatggttatggcagcactgcataattctcttactgtcatgccatccgtaagatgcttttctgtgactggtgagtactcaaccaagtcattctgagaatagtgtatgcggcgaccgagttgctcttgcccggcgtcaatacgggataataccgcgccacatagcagaactttaaaagtgctcatcattggaaaacgttcttcggggcgaaaactctcaaggatcttaccgctgttgagatccagttcgatgtaacccactcgtgcacccaactgatcttcagcatcttttactttcaccagcgtttctgggtgagcaaaaacaggaaggcaaaatgccgcaaaaaagggaataagggcgacacggaaatgttgaatactcatactcttcctttttcaatattattgaagcatttatcagggttattgtctcatgagcggatacatatttgaatgtatttagaaaaataaacaaataggggttccgcgcacatttccccgaaaagtgccacctgacgtcgacggatcgggagatcgatctcccgatcccctagggtcgactctcagtacaatctgctctgatgccgcatagttaagccagtatctgctccctgcttgtgtgttggaggtcgctgagtagtgcgcgagcaaaatttaagctacaacaaggcaaggcttgaccgacaattgcatgaagaatctgcttagggttaggcgttttgcgctgcttcgcgatgtacgggccagatatacgcgttgacattgattattgactagttattaatagtaatcaattacggggtcattagttcatagcccatatatggagttccgcgttacataacttacggtaaatggcccgcctggctgaccgcccaacgacccccgcccattgacgtcaataatgacgtatgttcccatagtaacgccaatagggactttccattgacgtcaatgggtggagtatttacggtaaactgcccacttggcagtacatcaagtgtatcatatgccaagtacgccccctattgacgtcaatgacggtaaatggcccgcctggcattatgcccagtacatgaccttatgggactttcctacttggcagtacatctacgtattagtcatcgctattaccatggtgatgcggttttggcagtacatcaatgggcgtggatagcggtttgactcacggggatttccaagtctccaccccattgacgtcaatgggagtttgttttggcaccaaaatcaacgggactttccaaaatgtcgtaacaactccgccccattgacgcaaatgggcggtaggcgtgtacggtgggaggtctatataagcagagctggtttagtgaaccgtcagatccgctagagatccgcggccgctaatacgactcactatagggagagccgccaccatgaaacggacagccgacggaagcgagttcgagtcaccaaagaagaagcggaaagtcagttctgaggtggagttttcccacgagtactggatgagacatgccctgaccctggccaagagggcacgggatgagggggcgggtcctgtgggagccgtgctggtgctgaacaatagagtgatcggcgagggctggaacagagccatcggcctgcacgacccaacagcccatgccgaaattatggccctgagacagggcggcctggtcatgcagaactacagactgtttgacgccaccctgtacgtgacattcgagccttgcgtgatgtgcgccggcgccatgatcaactctaggatcggccgcgtggtgtttggcgtgaggaactcaaaaagaggcgccgcaggctccctgatgaacgtgctgaactaccccggcatgaatcaccgcgtcgaaattaccgagggaatcctggcagatgaatgtgccgccctgctgtgcgatttctatcggatgcctagacaggtgttcaattctcagaagaaggcccagagctccatcaactctggcggatctagcggaggatcctctggcagcgagacaccaggaacaagcgagtcagcaacaccagagagcagtggcggcagcagcggcggcagcgcccgcatcctcgctttcgcaatcggaatctctagtatcggatgggccttctctgaaaacgacgaactgaaagactgcggcgtgagaatcttcacaaaggttgaaaaccctaaaacaggcgagtctttagctctgccacgtaggttggcccgctccgcccgaaaaaggtatgctcggcggaaggctcgcctcaaccacttgaagcatttgatagctaatgagttcaaactgaactacgaagattaccagtccttcgacgagtcattggcaaaagcctacaaaggcagccttatcagtccttatgagttgagatttcgcgcactcaacgaactgctttctaagcaagactttgctagggtcattctgcacatcgcaaaacggcgaggttatgacgatatcaagaactccgacgataaagaaaagggagccattctcaaggcgatcaaacagaatgaggaaaaattggcaaactaccagagtgtgggcgagtatctgtataaagagtatttccagaagtttaaggaaaacagcaaggagtttacaaacgtcagaaataaaaaggagtcttacgagagatgcatcgcgcagtcattcctcaaagatgagctgaagctgatatttaagaagcaacgcgaatttggtttctcattctctaagaagttcgaagaggaggttctttccgtggcgttttacaagagggcgctcaaagacttctcccacctggttggtaactgtagtttcttcacggatgagaagcgagctcccaaaaattctcccctggctttcatgtttgttgccctgactcggatcattaacctgctgaacaacctgaaaaatactgaagggatcttgtatacgaaggacgacctaaatgcactcctgaatgaagtgctcaaaaacggaactctaacctataaacagaccaagaaattactggggctctctgacgactacgagttcaagggcgagaagggtacttattttatcgaattcaaaaagtataaggagttcattaaagcattgggggaacacaacctcagccaggacgatctcaatgaaattgccaaggacatcacgctgattaaagacgagataaaactgaaaaaggcactggccaagtatgacctcaaccagaaccagatcgactctctgtccaagctggagttcaaagaccacctaaacatatccttcaaagccctgaaactggtcacccctctaatgctcgaaggaaaaaaatacgacgaggcgtgtaatgaactgaatcttaaggtggccatcaatgaggataagaaggactttcttccagcctttaacgagacatattacaaagacgaggtcacaaacccggttgtgctgagggccataaaagagtatcggaaggttctgaatgccctcctgaagaagtacggcaaagtgcacaaaataaatatcgaattggctagggaggtggggaagaaccattctcagcgagcaaagatcgagaaagagcagaatgagaactacaaagccaagaaagacgccgaactggagtgcgaaaagctggggcttaaaataaacagtaaaaacatcctgaaattaagattgttcaaagagcaaaaggagttttgcgcctactcaggggaaaaaatcaaaatatcagacctgcaggacgagaaaatgctggagatcgaccatatctatccgtatagcaggtcatttgacgattcctacatgaacaaagtgcttgtgtttaccaaacagaaccaagaaaagctgaaccaaaccccctttgaggctttcggaaacgactcagccaagtggcagaaaatcgaagtcctagccaagaatctgcctacaaaaaaacaaaagaggattcttgataagaactataaggacaaggaacagaaaaactttaaagacaggaacctgaatgacacgaggtacattgcgcgactggttctaaactataccaaagactacctggatttcctccctctgagcgacgacgagaatactaaactgaatgatacccagaaaggctcaaaggtccacgttgaggctaagtccgggatgctgactagcgccctccgccacacgtggggcttcagcgccaaagatcggaataatcatcttcatcacgct

SEQ ID NO: 713 - DNA, 8778 bp, synthetic construct
  source 1..8778: mol_type = other DNA
tagttattaatagtaatcaattacggggtcattagttcatagcccatatatggagttccgcgttacataacttacggtaaatggcccgcctggctgaccgcccaacgacccccgcccattgacgtcaataatgacgtatgttcccatagtaacgccaatagggactttccattgacgtcaatgggtggagtatttacggtaaactgcccacttggcagtacatcaagtgtatcatatgccaagtacgccccctattgacgtcaatgacggtaaatggcccgcctggcattatgcccagtacatgaccttatgggactttcctacttggcagtacatctacgtattagtcatcgctattaccatggtgatgcggttttggcagtacatcaatgggcgtggatagcggtttgactcacggggatttccaagtctccaccccattgacgtcaatgggagtttgttttggcaccaaaatcaacgggactttccaaaatgtcgtaacaactccgccccattgacgcaaatgggcggtaggcgtgtacggtgggaggtctatataagcagagctggtttagtgaaccgtcagatccgctagagatccgcggccgctaatacgactcactatagggagagccgccaccatgaaacggacagccgacggaagcgagttcgagtcaccaaagaagaagcggaaagtcagttctgaggtggagttttcccacgagtactggatgagacatgccctgaccctggccaagagggcacgggatgagggggcgggtcctgtgggagccgtgctggtgctgaacaatagagtgatcggcgagggctggaacagagccatcggcctgcacgacccaacagcccatgccgaaattatggccctgagacagggcggcctggtcatgcagaactacagactgtttgacgccaccctgtacgtgacattcgagccttgcgtgatgtgcgccggcgccatgatcaactctaggatcggccgcgtggtgtttggcgtgaggaactcaaaaagaggcgccgcaggctccctgatgaacgtgctgaactaccccggcatgaatcaccgcgtcgaaattaccgagggaatcctggcagatgaatgtgccgccctgctgtgcgatttctatcggatgcctagacaggtgttcaattctcagaagaaggcccagagctccatcaactctggcggatctagcggaggatcctctggcagcgagacaccaggaacaagcgagtcagcaacaccagagagcagtggcggcagcagcggcggcagcgacaagaagtacagcatcggcctggccatcggcaccaactctgtgggctgggccgtgatcaccgacgagtacaaggtgcccagcaagaaattcaaggtgctgggcaacaccgaccggcacagcatcaagaagaacctgatcggagccctgctgttcgacagcggcgaaacagccgaggccacccggctgaagagaaccgccagaagaagatacaccagacggaagaaccggatctgctatctgcaagagatcttcagcaacgagatggccaaggtggacgacagcttcttccacagactggaagagtccttcctggtggaagaggataagaagcacgagcggcaccccatcttcggcaacatcgtggacgaggtggcctaccacgagaagtaccccaccatctaccacctgagaaagaaactggtggacagcaccgacaaggccgacctgcggctgatctatctggccctggcccacatgatcaagttccggggccacttcctgatcgagggcgacctgaaccccgacaacagcgacgtggacaagctgttcatccagctggtgcagacctacaaccagctgttcgaggaaaaccccatcaacgccagcggcgtggacgccaaggccatcctgtctgccagactgagcaagagcagacggctggaaaatctgatcgcccagctgcccggcgagaagaagaatggcctgttcggaaacctgattgccctgagcctgggcctgacccccaacttcaagagcaacttcgacctggccgaggatgccaaactgcagctgagcaaggacacctacgacgacgacctggacaacctgctggcccagatcggcgaccagtacgccgacctgtttctggccgccaagaacctgtccgacgccatcctgctgagcgacatcctgagagtgaacaccgagatcaccaaggcccccctgagcgcctctatgatcaagagatacgacgagcaccaccaggacctgaccctgctgaaagctctcgtgcggcagcagctgcctgagaagtacaaagagattttcttcgaccagagcaagaacggctacgccggctacattgacggcggagccagccaggaagagttctacaagttcatcaagcccatcctggaaaagatggacggcaccgaggaactgctcgtgaagctgaacagagaggacctgctgcggaagcagcggaccttcgacaacggcagcatcccccaccagatccacctgggagagctgcacgccattctgcggcggcaggaagatttttacccattcctgaaggacaaccgggaaaagatcgagaagatcctgaccttccgcatcccctactacgtgggccctctggccaggggaaacagcagattcgcctggatgaccagaaagagcgaggaaaccatcaccccctggaacttcgaggaagtggtggacaagggcgcttccgcccagagcttcatcgagcggatgaccaacttcgataagaacctgcccaacgagaaggtgctgcccaagcacagcctgctgtacgagtacttcaccgtgtataacgagctgaccaaagtgaaatacgtgaccgagggaatgagaaagcccgccttcctgagcggcgagcagaaaaaggccatcgtggacctgctgttcaagaccaaccggaaagtgaccgtgaagcagctgaaagaggactacttcaagaaaatcgagtgcttcgactccgtggaaatctccggcgtggaagatcggttcaacgcctccctgggcacataccacgatctgctgaaaattatcaaggacaaggacttcctggacaatgaggaaaacgaggacattctggaagatatcgtgctgaccctgacactgtttgaggacagagagatgatcgaggaacggctgaaaacctatgcccacctgttcgacgacaaagtgatgaagcagctgaagcggcggagatacaccggctggggcaggctgagccggaagctgatcaacggcatccgggacaagcagtccggcaagacaatcctggatttcctgaagtccgacggcttcgccaacagaaacttcatgcagctgatccacgacgacagcctgacctttaaagaggacatccagaaagcccaggtgtccggccagggcgatagcctgcacgagcacattgccaatctggccggcagccccgccattaagaagggcatcctgcagacagtgaaggtggtggacgagctcgtgaaagtgatgggccggcacaagcccgagaacatcgtgatcgaaatggccagagagaaccagaccacccagaagggacagaagaacagccgcgagagaatgaagcggatcgaagagggcatcaaagagctgggcagccagatcctgaaagaacaccccgtggaaaacacccagctgcagaacgagaagctgtacctgtactacctgcagaatgggcgggatatgtacgtggaccaggaactggacatcaaccggctgtccgactacgatgtggaccatatcgtgcctcagagctttctgaaggacgactccatcgacaacaaggtgctgaccagaagcgacaagaaccggggcaagagcgacaacgtgccctccgaagaggtcgtgaagaagatgaagaactactggcggcagctgctgaacgccaagctgattacccagagaaagttcgacaatctgaccaaggccgagagaggcggcctgagcgaactggataaggccggcttcatcaagagacagctggtggaaacccggcagatcacaaagcacgtggcacagatcctggactcccggatgaacactaagtacgacgagaatgacaagctgatccgggaagtgaaagtgatcaccctgaagtccaagctggtgtccgatttccggaaggatttccagttttacaaagtgcgcgagatcaacaactaccaccacgcccacgacgcctacctgaacgccgtcgtgggaaccgccctgatcaaaaagtaccctaagctggaaagcgagttcgtgtacggcgactacaaggtgtacgacgtgcggaagatgatcgccaagagcgagcaggaaatcggcaaggctaccgccaagtacttcttctacagcaacatcatgaactttttcaagaccgagattaccctggccaacggcgagatccggaagcggcctctgatcgagacaaacggcgaaaccggggagatcgtgtgggataagggccgggattttgccaccgtgcggaaagtgctgagcatgccccaagtgaatatcgtgaaaaagaccgaggtgcagacaggcggcttcagcaaagagtctatcctgcccaagaggaacagcgataagctgatcgccagaaagaaggactgggaccctaagaagtacggcggcttcgacagccccaccgtggcctattctgtgctggtggtggccaaagtggaaaagggcaagtccaagaaactgaagagtgtgaaagagctgctggggatcaccatcatggaaagaagcagcttcgagaagaatcccatcgactttctggaagccaagggctacaaagaagtgaaaaaggacctgatcatcaagctgcctaagtactccctgttcgagctggaaaacggccggaagagaatgctggcctctgccggcgaactgcagaagggaaacgaactggccctgccctccaaatatgtgaacttcctgtacctggccagccactatgagaagctgaagggctcccccgaggataatgagcagaaacagctgtttgtggaacagcacaagcactacctggacgagatcatcgagcagatcagcgagttctccaagagagtgatcctggccgacgctaatctggacaaagtgctgtccgcctacaacaagcaccgggataagcccatcagagagcaggccgagaatatcatccacctgtttaccctgaccaatctgggagcccctgccgccttcaagtactttgacaccaccatcgaccggaagaggtacaccagcaccaaagaggtgctggacgccaccctgatccaccagagcatcaccggcctgtacgagacacggatcgacctgtctcagctgggaggtgacagcggcgggagcggcgggagcggggggagcactaatctgagcgacatcattgagaaggagactgggaaacagctggtcattcaggagtccatcctgatgctgcctgaggaggtggaggaagtgatcggcaacaagccagagtctgacatcctggtgcacaccgcctacgacgagtccacagatgagaatgtgatgctgctgacctctgacgcccccgagtataagccttgggccctggtcatccaggattctaacggcgagaataagatcaagatgctgagcggaggatccggaggatctggaggcagcaccaacctgtctgacatcatcgagaaggagacaggcaagcagctggtcatccaggagagcatcctgatgctgcccgaagaagtcgaagaagtgatcggaaacaagcctgagagcgatatcctggtccataccgcctacgacgagagtaccgacgaaaatgtgatgctgctgacatccgacgccccagagtataagccctgggctctggtcatccaggattccaacggagagaacaaaatcaaaatgctgtctggcggctcaaaaagaaccgccgacggcagcgaattcgagcccaagaagaagaggaaagtctaaccggtcatcatcaccatcaccattgagtttaaacccgctgatcagcctcgactgtgccttctagttgccagccatctgttgtttgcccctcccccgtgccttccttgaccctggaaggtgccactcccactgtcctttcctaataaaatgaggaaattgcatcgcattgtctgagtaggtgtcattctattctggggggtggggtggggcaggacagcaagggggaggattgggaagacaatagcaggcatgctggggatgcggtgggctctatggcttctgaggcggaaagaaccagctggggctcgataccgtcgacctctagctagagcttggcgtaatcatggtcatagctgtttcctgtgtgaaattgttatccgctcacaattccacacaacatacgagccggaagcataaagtgtaaagcctagggtgcctaatgagtgagctaactcacattaattgcgttgcgctcactgcccgctttccagtcgggaaacctgtcgtgccagctgcattaatgaatcggccaacgcgcgggaagaggcggtttgcgtattgggcgcacttccgcttcctcgctcactgactcgctgcgctcggtcgttcggctgcggcgagcggtatcagctcactcaaaggcggtaatacggttatccacagaatcaggggataacgcaggaaagaacatgtgagcaaaaggccagcaaaaggccaggaaccgtaaaaaggccgcgttgctggcgtttttccataggctccgcccccctgacgagcatcacaaaaatcgacgctcaagtcagaggtggcgaaacccgacaggactataaagataccaggcgtttccccctggaagctccctcgtgcgctctcctgttccgaccctgccgcttaccggatacctgtccgcctttctcccttcgggaagcgtggcgctttctcatagctcacgctgtaggtatctcagttcggtgtaggtcgttcgctccaagctgggctgtgtgcacgaaccccccgttcagcccgaccgctgcgccttatccggtaactatcgtcttgagtccaacccggtaagacacgacttatcgccactggcagcagccactggtaacaggattagcagagcgaggtatgtaggcggtgctacagagttcttgaagtggtggcctaactacggctacactagaagaacagtatttggtatctgcgctctgctgaagccagttaccttcggaaaaagagttggtagctcttgatccggcaaacaaaccaccgctggtagcggtggtttttttgtttgcaagcagcagattacgcgcagaaaaaaaggatctcaagaaaatcctttgatcttttctacggggtctgacactcagtggaacgaaaactcacgttaagggattttggtcatgagattatcaaaaaggatcttcacctagatccttttaaattaaaaatgaagttttaaatcaatctaaagtatatatgagtaaacttggtctgacagttaccaatgcttaatcagtgaggcacctatctcagcgatctgtctatttcgttcatccatagttgcctgactccccgtcgtgtagataactacgatacgggagggcttaccatctggccccagtgctgcaatgataccgcgggacccacgctcaccggctccagatttatcagcaataaaccagccagccggaagggccgagcgcagaagtggtcctgcaactttatccgcctccatccagtctattaattgttgccgggaagctagagtaagtagttcgccagttaatagtttgcgcaacgttgttgccattgctacaggcatcgtggtgtcacgctcgtcgtttggtatggcttcattcagctccggttcccaacgatcaaggcgagttacatgatcccccatgttgtgcaaaaaagcggttagctccttcggtcctccgatcgttgtcagaagtaagttggccgcagtgttatcactcatggttatggcagcactgcataattctcttactgtcatgccatccgtaagatgcttttctgtgactggtgagtactcaaccaagtcattctgagaatagtgtatgcggcgaccgagttgctcttgcccggcgtcaatacgggataataccgcgccacatagcagaactttaaaagtgctcatcattggaaaacgttcttcggggcgaaaactctcaaggatcttaccgctgttgagatccagttcgatgtaacccactcgtgcacccaactgatcttcagcatcttttactttcaccagcgtttctgggtgagcaaaaacaggaaggcaaaatgccgcaaaaaagggaataagggcgacacggaaatgttgaatactcatactcttcctttttcaatattattgaagcatttatcagggttattgtctcatgagcggatacatatttgaatgtatttagaaaaataaacaaataggggttccgcgcacatttccccgaaaagtgccacctgacgtcgacggatcgggagatcgatctcccgatcccctagggtcgactctcagtacaatctgctctgatgccgcatagttaagccagtatctgctccctgcttgtgtgttggaggtcgctgagtagtgcgcgagcaaaatttaagctacaacaaggcaaggcttgaccgacaattgcatgaagaatctgcttagggttaggcgttttgcgctgcttcgcgatgtacgggccagatatacgcgttgacattgattattgac

SEQ ID NO: 714 - DNA, 7836 bp, synthetic construct
  source 1..7836: mol_type = other DNA
tagttattaatagtaatcaattacggggtcattagttcatagcccatatatggagttccgcgttacataacttacggtaaatggcccgcctggctgaccgcccaacgacccccgcccattgacgtcaataatgacgtatgttcccatagtaacgccaatagggactttccattgacgtcaatgggtggagtatttacggtaaactgcccacttggcagtacatcaagtgtatcatatgccaagtacgccccctattgacgtcaatgacggtaaatggcccgcctggcattatgcccagtacatgaccttatgggactttcctacttggcagtacatctacgtattagtcatcgctattaccatggtgatgcggttttggcagtacatcaatgggcgtggatagcggtttgactcacggggatttccaagtctccaccccattgacgtcaatgggagtttgttttggcaccaaaatcaacgggactttccaaaatgtcgtaacaactccgccccattgacgcaaatgggcggtaggcgtgtacggtgggaggtctatataagcagagctggtttagtgaaccgtcagatccgctagagatccgcggccgctaatacgactcactatagggagagccgccaccatgaaacggacagccgacggaagcgagttcgagtcaccaaagaagaagcggaaagtcagttctgaggtggagttttcccacgagtactggatgagacatgccctgaccctggccaagagggcacgggatgagggggcgggtcctgtgggagccgtgctggtgctgaacaatagagtgatcggcgagggctggaacagagccatcggcctgcacgacccaacagcccatgccgaaattatggccctgagacagggcggcctggtcatgcagaactacagactgtttgacgccaccctgtacgtgacattcgagccttgcgtgatgtgcgccggcgccatgatcaactctaggatcggccgcgtggtgtttggcgtgaggaactcaaaaagaggcgccgcaggctccctgatgaacgtgctgaactaccccggcatgaatcaccgcgtcgaaattaccgagggaatcctggcagatgaatgtgccgccctgctgtgcgatttctatcggatgcctagacaggtgttcaattctcagaagaaggcccagagctccatcaactctggcggatctagcggaggatcctctggcagcgagacaccaggaacaagcgagtcagcaacaccagagagcagtggcggcagcagcggcggcagcgggaagcgaaattacattctggggctggccattggcattacatcagtgggctatggcatcattgactacgagacaagggacgtgatcgacgccggcgtgagactgttcaaggaggccaacgtggagaacaatgagggccggagatccaagaggggagcaaggcgcctgaagcggagaaggcgccacagaatccagagagtgaagaagctgctgttcgattacaacctgctgaccgaccactccgagctgtctggcatcaatccttatgaggccagagtgaagggcctgtcccagaagctgtctgaggaggagtttagcgccgccctgctgcacctggcaaagaggagaggcgtgcacaacgtgaatgaggtggaggaggacaccggcaacgagctgtccacaaaggagcagatcagccgcaattccaaggccctggaggagaagtatgtggccgagctgcagctggagcggctgaagaaggatggcgaggtgaggggctccatcaatcgcttcaagacctctgactacgtgaaggaggccaagcagctgctgaaggtgcagaaggcctaccaccagctggatcagtcctttatcgatacatatatcgacctgctggagacaaggcgcacatactatgagggaccaggagagggctctcccttcggctggaaggacatcaaggagtggtacgagatgctgatgggccactgcacctattttccagaggagctgagaagcgtgaagtacgcctataacgccgatctgtacaacgccctgaatgacctgaacaacctggtcatcaccagggatgagaacgagaagctggagtactatgagaagttccagatcatcgagaacgtgttcaagcagaagaagaagcctacactgaagcagatcgccaaggagatcctggtgaacgaggaggacatcaagggctaccgcgtgacctccacaggcaagccagagttcaccaatctgaaggtgtatcacgatatcaaggacatcacagcccggaaggagatcatcgagaacgccgagctgctggatcagatcgccaagatcctgaccatctatcagagctccgaggacatccaggaggagctgaccaacctgaatagcgagctgacacaggaggagatcgagcagatcagcaatctgaagggctacaccggcacacacaacctgagcctgaaggccatcaatctgatcctggatgagctgtggcacacaaacgacaatcagatcgccatctttaaccggctgaagctggtgccaaagaaggtggacctgtcccagcagaaggagatcccaaccacactggtggacgatttcatcctgtctcccgtggtgaagcggagcttcatccagagcatcaaagtgatcaacgccatcatcaagaagtacggcctgcccaatgatatcatcatcgagctggccagggagaagaactccaaggacgcccagaagatgatcaatgagatgcagaagaggaaccgccagaccaatgagcggatcgaggagatcatcagaaccacaggcaaggagaacgccaagtacctgatcgagaagatcaagctgcacgatatgcaggagggcaagtgtctgtattctctggaggccatccctctggaggacctgctgaacaatccattcaactacgaggtggatcacatcatcccccggagcgtgagcttcgacaattcttttaacaataaggtgctggtgaagcaggaggagaacagcaagaagggcaataggacccctttccagtacctgtctagctccgattctaagatcagctacgagacattcaagaagcacatcctgaatctggccaagggcaagggccgcatcagcaagaccaagaaggagtacctgctggaggagcgggacatcaacagattctccgtgcagaaggacttcatcaaccggaatctggtggacaccagatacgccacacgcggcctgatgaatctgctgcggtcttatttcagagtgaacaatctggatgtgaaggtaaagagcatcaacggcggcttcacctcctttctgcggagaaagtggaagtttaagaaggagcgcaacaagggctataagcaccacgccgaggatgccctgatcatcgccaatgccgacttcatctttaaggagtggaagaagctggacaaggccaagaaagtgatggagaaccagatgttcgaggagaagcaggccgagagcatgcccgagatcgagacagagcaggagtacaaggagattttcatcacacctcaccagatcaagcacatcaaggacttcaaggactacaagtattctcacagggtggataagaagcccaaccgcgagctgatcaatgacaccctgtatagcacacggaaggacgataagggcaataccctgatcgtgaacaatctgaacggcctgtacgacaaggataatgacaagctgaagaagctgatcaacaagtctcccgagaagctgctgatgtaccaccacgatcctcagacatatcagaagctgaagctgatcatggagcagtacggcgacgagaagaacccactgtataagtactatgaggagacaggcaactacctgacaaagtatagcaagaaggataatggccccgtgatcaagaagatcaagtactatggcaacaagctgaatgcccacctggacatcaccgacgattaccctaactctcgcaataaggtggtgaagctgagcctgaagccataccggttcgacgtgtacctggacaacggcgtgtataagtttgtgacagtgaagaatctggatgtgatcaagaaggagaactactatgaggtgaacagcaagtgctacgaggaggccaagaagctgaagaagatcagcaaccaggccgagttcatcgcctctttttacaacaatgacctgatcaagatcaatggcgagctgtatagagtgatcggcgtgaacaatgatctgctgaacagaatcgaagtgaatatgatcgacatcacctacagggagtatctggagaacatgaatgataagaggccccctcgcatcatcaagaccatcgcctctaagacacagagcatcaagaagtacagcacagacatcctggggaacctgtatgaagtcaagagcaagaaacatcctcagattatcaagaaaggcagcggcgggagcggcgggagcggggggagcactaatctgagcgacatcattgagaaggagactgggaaacagctggtcattcaggagtccatcctgatgctgcctgaggaggtggaggaagtgatcggcaacaagccagagtctgacatcctggtgcacaccgcctacgacgagtccacagatgagaatgtgatgctgctgacctctgacgcccccgagtataagccttgggccctggtcatccaggattctaacggcgagaataagatcaagatgctgagcggaggatccggaggatctggaggcagcaccaacctgtctgacatcatcgagaaggagacaggcaagcagctggtcatccaggagagcatcctgatgctgcccgaagaagtcgaagaagtgatcggaaacaagcctgagagcgatatcctggtccataccgcctacgacgagagtaccgacgaaaatgtgatgctgctgacatccgacgccccagagtataagccctgggctctggtcatccaggattccaacggagagaacaaaatcaaaatgctgtctggcggctcaaaaagaaccgccgacggcagcgaattcgagcccaagaagaagaggaaagtctaaccggtcatcatcaccatcaccattgagtttaaacccgctgatcagcctcgactgtgccttctagttgccagccatctgttgtttgcccctcccccgtgccttccttgaccctggaaggtgccactcccactgtcctttcctaataaaatgaggaaattgcatcgcattgtctgagtaggtgtcattctattctggggggtggggtggggcaggacagcaagggggaggattgggaagacaatagcaggcatgctggggatgcggtgggctctatggcttctgaggcggaaagaaccagctggggctcgataccgtcgacctctagctagagcttggcgtaatcatggtcatagctgtttcctgtgtgaaattgttatccgctcacaattccacacaacatacgagccggaagcataaagtgtaaagcctagggtgcctaatgagtgagctaactcacattaattgcgttgcgctcactgcccgctttccagtcgggaaacctgtcgtgccagctgcattaatgaatcggccaacgcgcgggaagaggcggtttgcgtattgggcgcacttccgcttcctcgctcactgactcgctgcgctcggtcgttcggctgcggcgagcggtatcagctcactcaaaggcggtaatacggttatccacagaatcaggggataacgcaggaaagaacatgtgagcaaaaggccagcaaaaggccaggaaccgtaaaaaggccgcgttgctggcgtttttccataggctccgcccccctgacgagcatcacaaaaatcgacgctcaagtcagaggtggcgaaacccgacaggactataaagataccaggcgtttccccctggaagctccctcgtgcgctctcctgttccgaccctgccgcttaccggatacctgtccgcctttctcccttcgggaagcgtggcgctttctcatagctcacgctgtaggtatctcagttcggtgtaggtcgttcgctccaagctgggctgtgtgcacgaaccccccgttcagcccgaccgctgcgccttatccggtaactatcgtcttgagtccaacccggtaagacacgacttatcgccactggcagcagccactggtaacaggattagcagagcgaggtatgtaggcggtgctacagagttcttgaagtggtggcctaactacggctacactagaagaacagtatttggtatctgcgctctgctgaagccagttaccttcggaaaaagagttggtagctcttgatccggcaaacaaaccaccgctggtagcggtggtttttttgtttgcaagcagcagattacgcgcagaaaaaaaggatctcaagaaaatcctttgatcttttctacggggtctgacactcagtggaacgaaaactcacgttaagggattttggtcatgagattatcaaaaaggatcttcacctagatccttttaaattaaaaatgaagttttaaatcaatctaaagtatatatgagtaaacttggtctgacagttaccaatgcttaatcagtgaggcacctatctcagcgatctgtctatttcgttcatccatagttgcctgactccccgtcgtgtagataactacgatacgggagggcttaccatctggccccagtgctgcaatgataccgcgggacccacgctcaccggctccagatttatcagcaataaaccagccagccggaagggccgagcgcagaagtggtcctgcaactttatccgcctccatccagtctattaattgttgccgggaagctagagtaagtagttcgccagttaatagtttgcgcaacgttgttgccattgctacaggcatcgtggtgtcacgctcgtcgtttggtatggcttcattcagctccggttcccaacgatcaaggcgagttacatgatcccccatgttgtgcaaaaaagcggttagctccttcggtcctccgatcgttgtcagaagtaagttggccgcagtgttatcactcatggttatggcagcactgcataattctcttactgtcatgccatccgtaagatgcttttctgtgactggtgagtactcaaccaagtcattctgagaatagtgtatgcggcgaccgagttgctcttgcccggcgtcaatacgggataataccgcgccacatagcagaactttaaaagtgctcatcattggaaaacgttcttcggggcgaaaactctcaaggatcttaccgctgttgagatccagttcgatgtaacccactcgtgcacccaactgatcttcagcatcttttactttcaccagcgtttctgggtgagcaaaaacaggaaggcaaaatgccgcaaaaaagggaataagggcgacacggaaatgttgaatactcatactcttcctttttcaatattattgaagcatttatcagggttattgtctcatgagcggatacatatttgaatgtatttagaaaaataaacaaataggggttccgcgcacatttccccgaaaagtgccacctgacgtcgacggatcgggagatcgatctcccgatcccctagggtcgactctcagtacaatctgctctgatgccgcatagttaagccagtatctgctccctgcttgtgtgttggaggtcgctgagtagtgcgcgagcaaaatttaagctacaacaaggcaaggcttgaccgacaattgcatgaagaatctgcttagggttaggcgttttgcgctgcttcgcgatgtacgggccagatatacgcgttgacattgattattgac

SEQ ID NO: 715 - DNA, 8778 bp, synthetic construct
  source 1..8778: mol_type = other DNA
tagttattaatagtaatcaattacggggtcattagttcatagcccatatatggagttccgcgttacataacttacggtaaatggcccgcctggctgaccgcccaacgacccccgcccattgacgtcaataatgacgtatgttcccatagtaacgccaatagggactttccattgacgtcaatgggtggagtatttacggtaaactgcccacttggcagtacatcaagtgtatcatatgccaagtacgccccctattgacgtcaatgacggtaaatggcccgcctggcattatgcccagtacatgaccttatgggactttcctacttggcagtacatctacgtattagtcatcgctattaccatggtgatgcggttttggcagtacatcaatgggcgtggatagcggtttgactcacggggatttccaagtctccaccccattgacgtcaatgggagtttgttttggcaccaaaatcaacgggactttccaaaatgtcgtaacaactccgccccattgacgcaaatgggcggtaggcgtgtacggtgggaggtctatataagcagagctggtttagtgaaccgtcagatccgctagagatccgcggccgctaatacgactcactatagggagagccgccaccatgaaacggacagccgacggaagcgagttcgagtcaccaaagaagaagcggaaagtcagttctgaggtggagttttcccacgagtactggatgagacatgccctgaccctggccaagagggcacgggatgagggggcgggtcctgtgggagccgtgctggtgctgaacaatagagtgatcggcgagggctggaacagagccatcggcctgcacgacccaacagcccatgccgaaattatggccctgagacagggcggcctggtcatgcagaactacagactgtttgacgccaccctgtacgtgacattcgagccttgcgtgatgtgcgccggcgccatgatcaactctaggatcggccgcgtggtgtttggcgtgaggaactcaaaaagaggcgccgcaggctccctgatgaacgtgctgaactaccccggcatgaatcaccgcgtcgaaattaccgagggaatcctggcagatgaatgtgccgccctgctgtgcgatttctatcggatgcctagacaggtgttcaattctcagaagaaggcccagagctccatcaactctggcggatctagcggaggatcctctggcagcgagacaccaggaacaagcgagtcagcaacaccagagagcagtggcggcagcagcggcggcagcgacaagaagtacagcatcggcctggccatcggcaccaactctgtgggctgggccgtgatcaccgacgagtacaaggtgcccagcaagaaattcaaggtgctgggcaacaccgaccggcacagcatcaagaagaacctgatcggagccctgctgttcgacagcggcgaaacagccgaggccacccggctgaagagaaccgccagaagaagatacaccagacggaagaaccggatctgctatctgcaagagatcttcagcaacgagatggccaaggtggacgacagcttcttccacagactggaagagtccttcctggtggaagaggataagaagcacgagcggcaccccatcttcggcaacatcgtggacgaggtggcctaccacgagaagtaccccaccatctaccacctgagaaagaaactggtggacagcaccgacaaggccgacctgcggctgatctatctggccctggcccacatgatcaagttccggggccacttcctgatcgagggcgacctgaaccccgacaacagcgacgtggacaagctgttcatccagctggtgcagacctacaaccagctgttcgaggaaaaccccatcaacgccagcggcgtggacgccaaggccatcctgtctgccagactgagcaagagcagacggctggaaaatctgatcgcccagctgcccggcgagaagaagaatggcctgttcggaaacctgattgccctgagcctgggcctgacccccaacttcaagagcaacttcgacctggccgaggatgccaaactgcagctgagcaaggacacctacgacgacgacctggacaacctgctggcccagatcggcgaccagtacgccgacctgtttctggccgccaagaacctgtccgacgccatcctgctgagcgacatcctgagagtgaacaccgagatcaccaaggcccccctgagcgcctctatgatcaagagatacgacgagcaccaccaggacctgaccctgctgaaagctctcgtgcggcagcagctgcctgagaagtacaaagagattttcttcgaccagagcaagaacggctacgccggctacattgacggcggagccagccaggaagagttctacaagttcatcaagcccatcctggaaaagatggacggcaccgaggaactgctcgtgaagctgaacagagaggacctgctgcggaagcagcggaccttcgacaacggcagcatcccccaccagatccacctgggagagctgcacgccattctgcggcggcaggaagatttttacccattcctgaaggacaaccgggaaaagatcgagaagatcctgaccttccgcatcccctactacgtgggccctctggccaggggaaacagcagattcgcctggatgaccagaaagagcgaggaaaccatcaccccctggaacttcgaggaagtggtggacaagggcgcttccgcccagagcttcatcgagcggatgaccaacttcgataagaacctgcccaacgagaaggtgctgcccaagcacagcctgctgtacgagtacttcaccgtgtataacgagctgaccaaagtgaaatacgtgaccgagggaatgagaaagcccgccttcctgagcggcgagcagaaaaaggccatcgtggacctgctgttcaagaccaaccggaaagtgaccgtgaagcagctgaaagaggactacttcaagaaaatcgagtgcttcgactccgtggaaatctccggcgtggaagatcggttcaacgcctccctgggcacataccacgatctgctgaaaattatcaaggacaaggacttcctggacaatgaggaaaacgaggacattctggaagatatcgtgctgaccctgacactgtttgaggacagagagatgatcgaggaacggctgaaaacctatgcccacctgttcgacgacaaagtgatgaagcagctgaagcggcggagatacaccggctggggcaggctgagccggaagctgatcaacggcatccgggacaagcagtccggcaagacaatcctggatttcctgaagtccgacggcttcgccaacagaaacttcatgcagctgatccacgacgacagcctgacctttaaagaggacatccagaaagcccaggtgtccggccagggcgatagcctgcacgagcacattgccaatctggccggcagccccgccattaagaagggcatcctgcagacagtgaaggtggtggacgagctcgtgaaagtgatgggccggcacaagcccgagaacatcgtgatcgaaatggccagagagaaccagaccacccagaagggacagaagaacagccgcgagagaatgaagcggatcgaagagggcatcaaagagctgggcagccagatcctgaaagaacaccccgtggaaaacacccagctgcagaacgagaagctgtacctgtactacctgcagaatgggcgggatatgtacgtggaccaggaactggacatcaaccggctgtccgactacgatgtggaccatatcgtgcctcagagctttctgaaggacgactccatcgacaacaaggtgctgaccagaagcgacaagaaccggggcaagagcgacaacgtgccctccgaagaggtcgtgaagaagatgaagaactactggcggcagctgctgaacgccaagctgattacccagagaaagttcgacaatctgaccaaggccgagagaggcggcctgagcgaactggataaggccggcttcatcaagagacagctggtggaaacccggcagatcacaaagcacgtggcacagatcctggactcccggatgaacactaagtacgacgagaatgacaagctgatccgggaagtgaaagtgatcaccctgaagtccaagctggtgtccgatttccggaaggatttccagttttacaaagtgcgcgagatcaacaactaccaccacgcccacgacgcctacctgaacgccgtcgtgggaaccgccctgatcaaaaagtaccctaagctggaaagcgagttcgtgtacggcgactacaaggtgtacgacgtgcggaagatgatcgccaagagcgagcaggaaatcggcaaggctaccgccaagtacttcttctacagcaacatcatgaactttttcaagaccgagattaccctggccaacggcgagatccggaagcggcctctgatcgagacaaacggcgaaaccggggagatcgtgtgggataagggccgggattttgccaccgtgcggaaagtgctgagcatgccccaagtgaatatcgtgaaaaagaccgaggtgcagacaggcggcttcagcaaagagtctatccggcccaagaggaacagcgataagctgatcgccagaaagaaggactgggaccctaagaagtacggcggcttcgtgagccccaccgtggcctattctgtgctggtggtggccaaagtggaaaagggcaagtccaagaaactgaagagtgtgaaagagctgctggggatcaccatcatggaaagaagcagcttcgagaagaatcccatcgactttctggaagccaagggctacaaagaagtgaaaaaggacctgatcatcaagctgcctaagtactccctgttcgagctggaaaacggccggaagagaatgctggcctctgcccggttcctgcagaagggaaacgaactggccctgccctccaaatatgtgaacttcctgtacctggccagccactatgagaagctgaagggctcccccgaggataatgagcagaaacagctgtttgtggaacagcacaagcactacctggacgagatcatcgagcagatcagcgagttctccaagagagtgatcctggccgacgctaatctggacaaagtgctgtccgcctacaacaagcaccgggataagcccatcagagagcaggccgagaatatcatccacctgtttaccctgaccaatctgggagcccctcgggccttcaagtactttgacaccaccatcgaccggaaggtgtaccggagcaccaaagaggtgctggacgccaccctgatccaccagagcatcaccggcctgtacgagacacggatcgacctgtctcagctgggaggtgacagcggcgggagcggcgggagcggggggagcactaatctgagcgacatcattgagaaggagactgggaaacagctggtcattcaggagtccatcctgatgctgcctgaggaggtggaggaagtgatcggcaacaagccagagtctgacatcctggtgcacaccgcctacgacgagtccacagatgagaatgtgatgctgctgacctctgacgcccccgagtataagccttgggccctggtcatccaggattctaacggcgagaataagatcaagatgctgagcggaggatccggaggatctggaggcagcaccaacctgtctgacatcatcgagaaggagacaggcaagcagctggtcatccaggagagcatcctgatgctgcccgaagaagtcgaagaagtgatcggaaacaagcctgagagcgatatcctggtccataccgcctacgacgagagtaccgacgaaaatgtgatgctgctgacatccgacgccccagagtataagccctgggctctggtcatccaggattccaacggagagaacaaaatcaaaatgctgtctggcggctcaaaaagaaccgccgacggcagcgaattcgagcccaagaagaagaggaaagtctaaccggtcatcatcaccatcaccattgagtttaaacccgctgatcagcctcgactgtgccttctagttgccagccatctgttgtttgcccctcccccgtgccttccttgaccctggaaggtgccactcccactgtcctttcctaataaaatgaggaaattgcatcgcattgtctgagtaggtgtcattctattctggggggtggggtggggcaggacagcaagggggaggattgggaagacaatagcaggcatgctggggatgcggtgggctctatggcttctgaggcggaaagaaccagctggggctcgataccgtcgacctctagctagagcttggcgtaatcatggtcatagctgtttcctgtgtgaaattgttatccgctcacaattccacacaacatacgagccggaagcataaagtgtaaagcctagggtgcctaatgagtgagctaactcacattaattgcgttgcgctcactgcccgctttccagtcgggaaacctgtcgtgccagctgcattaatgaatcggccaacgcgcggggagaggcggtttgcgtattgggcgcacttccgcttcctcgctcactgactcgctgcgctcggtcgttcggctgcggcgagcggtatcagctcactcaaaggcggtaatacggttatccacagaatcaggggataacgcaggaaagaacatgtgagcaaaaggccagcaaaaggccaggaaccgtaaaaaggccgcgttgctggcgtttttccataggctccgcccccctgacgagcatcacaaaaatcgacgctcaagtcagaggtggcgaaacccgacaggactataaagataccaggcgtttccccctggaagctccctcgtgcgctctcctgttccgaccctgccgcttaccggatacctgtccgcctttctcccttcgggaagcgtggcgctttctcatagctcacgctgtaggtatctcagttcggtgtaggtcgttcgctccaagctgggctgtgtgcacgaaccccccgttcagcccgaccgctgcgccttatccggtaactatcgtcttgagtccaacccggtaagacacgacttatcgccactggcagcagccactggtaacaggattagcagagcgaggtatgtaggcggtgctacagagttcttgaagtggtggcctaactacggctacactagaagaacagtatttggtatctgcgctctgctgaagccagttaccttcggaaaaagagttggtagctcttgatccggcaaacaaaccaccgctggtagcggtggtttttttgtttgcaagcagcagattacgcgcagaaaaaaaggatctcaagaagatcctttgatcttttctacggggtctgacactcagtggaacgaaaactcacgttaagggattttggtcatgagattatcaaaaaggatcttcacctagatccttttaaattaaaaatgaagttttaaatcaatctaaagtatatatgagtaaacttggtctgacagttaccaatgcttaatcagtgaggcacctatctcagcgatctgtctatttcgttcatccatagttgcctgactccccgtcgtgtagataactacgatacgggagggcttaccatctggccccagtgctgcaatgataccgcgggacccacgctcaccggctccagatttatcagcaataaaccagccagccggaagggccgagcgcagaagtggtcctgcaactttatccgcctccatccagtctattaattgttgccgggaagctagagtaagtagttcgccagttaatagtttgcgcaacgttgttgccattgctacaggcatcgtggtgtcacgctcgtcgtttggtatggcttcattcagctccggttcccaacgatcaaggcgagttacatgatcccccatgttgtgcaaaaaagcggttagctccttcggtcctccgatcgttgtcagaagtaagttggccgcagtgttatcactcatggttatggcagcactgcataattctcttactgtcatgccatccgtaagatgcttttctgtgactggtgagtactcaaccaagtcattctgagaatagtgtatgcggcgaccgagttgctcttgcccggcgtcaatacgggataataccgcgccacatagcagaactttaaaagtgctcatcattggaaaacgttcttcggggcgaaaactctcaaggatcttaccgctgttgagatccagttcgatgtaacccactcgtgcacccaactgatcttcagcatcttttactttcaccagcgtttctgggtgagcaaaaacaggaaggcaaaatgccgcaaaaaagggaataagggcgacacggaaatgttgaatactcatactcttcctttttcaatattattgaagcatttatcagggttattgtctcatgagcggatacatatttgaatgtatttagaaaaataaacaaataggggttccgcgcacatttccccgaaaagtgccacctgacgtcgacggatcgggagatcgatctcccgatcccctagggtcgactctcagtacaatctgctctgatgccgcatagttaagccagtatctgctccctgcttgtgtgttggaggtcgctgagtagtgcgcgagcaaaatttaagctacaacaaggcaaggcttgaccgacaattgcatgaagaatctgcttagggttaggcgttttgcgctgcttcgcgatgtacgggccagatatacgcgttgacattgattattgac

SEQ ID NO: 716 - protein, 12 aa, synthetic construct
EGGSEEEEESGS

SEQ ID NO: 717 - protein, 12 aa, synthetic construct
KGPKPKKEESEK

What is claimed:

1. A VHH antibody or an antigen binding fragment thereof that specifically binds to a cluster of differentiation 5 (CD5) polypeptide, wherein the VHH antibody comprises three Complementarity Determining Regions (CDRs): CDR1, CDR2 and CDR3, that are structurally positioned between four camelid VHH framework (FR) regions (FR1-FR4) as follows: FR1-CDR1-FR2-CDR2-FR3-CDR3-FR4; wherein
a) CDR1 is selected from the group consisting of: NYAAG (SEQ ID NO: 478), SYTMG (SEQ ID NO: 479), TYTMG (SEQ ID NO: 480), SYAMG (SEQ ID NO: 481), TYNMG (SEQ ID NO: 482), AYAMG (SEQ ID NO: 483), SSGMG (SEQ ID NO: 484), VDATT (SEQ ID NO: 485), INVIG (SEQ ID NO: 505), SSFMS (SEQ ID NO: 506), TNVMG (SEQ ID NO: 507), TNNMG (SEQ ID NO: 508), TNNMA (SEQ ID NO: 509), RVAMN (SEQ ID NO: 510), RVGMN (SEQ ID NO: 511), FVGWG (SEQ ID NO: 512), FIGWG (SEQ ID NO: 513), MYSMS (SEQ ID NO: 514), and TYGMG (SEQ ID NO: 515);
b) CDR2 is selected from the group consisting of RISRSGGRTDYADSVKG (SEQ ID NO: 486), AISWSAGRTYYADSMKG (SEQ ID NO: 487), VISWSGGRTYYADSVKG (SEQ ID NO: 488), AIDLYGRATRYANSVKG (SEQ ID NO: 489), AINLEGYATRYANSVKG (SEQ ID NO: 615), AIDLYGRATRYANSVRG (SEQ ID NO: 616), AINWNGDTALRWNGFATRYADSVKG (SEQ ID NO: 490), SMDWSGGSTYYGDSVKG (SEQ ID NO: 491), SIDWSGGSTYYGDSVKG (SEQ ID NO: 492), SIDWGGGSTYYGDSVKG (SEQ ID NO: 493), SIDWSGKSTYYGDSVKG (SEQ ID NO: 494), SINWSGGSAYYGDSVKG (SEQ ID NO: 495), SMDWTGGSTYYGDSVKG (SEQ ID NO: 496), IMDIGGVTEYADSVKG (SEQ ID NO: 497), LVNSGGQTHYADSVKG (SEQ ID NO: 516), TIYSDGSTYYADSVKG (SEQ ID NO: 517), TIYSDGSTYYADSMKG (SEQ ID NO: 518), LIRGGGSTHYADSVKG (SEQ ID NO: 519), LIRTGGSTHVADSMKG (SEQ ID NO: 520), TISSDGSRTNYAHSVKG (SEQ ID NO: 522), SISSDGSRTNYAHFVKG (SEQ ID NO: 523), QISTGGLTNYADSVKG (SEQ ID NO: 524), QINTGGLTDVYADSVKG (SEQ ID NO: 617), SISTGARDTAYADSVKG (SEQ ID NO: 526), SISTGARDTSYADSVKG (SEQ ID NO: 618), and VITGSGVGTQYADSVKD (SEQ ID NO: 527); and
c) CDR3 is selected from the group consisting of: ATVWEFTDGADQYDY (SEQ ID NO: 498), DPWTSDSDYDRLTMYDY (SEQ ID NO: 499), DPWTSDSDYERLTMYDY (SEQ ID NO: 500), DTSLPLGVLTESQRLYGA (SEQ ID NO: 501), DTSLPLGVLTKSQRMYGA (SEQ ID NO: 502), DTVVSGSYYLAARAEDYEY (SEQ ID NO: 503), GTSGVAAVNLRGFFS (SEQ ID NO: 504), RGL, RYGIDNY (SEQ ID NO: 528), VTGSI (SEQ ID NO: 529), WLGSPGAMSDY (SEQ ID NO: 530), WTGSPGALSDY (SEQ ID NO: 531), PGNS (SEQ ID NO: 532), PGHP (SEQ ID NO: 533), PGHS (SEQ ID NO: 534), GDLRYGPDGYDY (SEQ ID NO: 535), and GHRPGWAVIRADAYEY (SEQ ID NO: 536).

2. The method of claim 1, wherein:
a) CDR1 comprises the amino acid sequence NYAAG (SEQ ID NO: 478), CDR2 comprises the amino acid sequence RISRSGGRTDYADSVKG (SEQ ID NO: 486), and CDR3 comprises the amino acid sequence ATVWEFTDGADQYDY (SEQ ID NO: 498);
b) CDR1 comprises the amino acid sequence SYTMG (SEQ ID NO: 479), CDR2 comprises the amino acid sequence AISWSAGRTYYADSMKG (SEQ ID NO: 487), and CDR3 comprises the amino acid sequence DPWTSDSDYDRLTMYDY (SEQ ID NO: 499);
c) CDR1 comprises the amino acid sequence TYTMG (SEQ ID NO: 480), CDR2 comprises the amino acid sequence AISWSAGRTYYADSMKG (SEQ ID NO: 487), and CDR3 comprises the amino acid sequence DPWTSDSDYDRLTMYDY (SEQ ID NO: 499);
d) CDR1 comprises the amino acid sequence SYTMG (SEQ ID NO: 479), CDR2 comprises the amino acid sequence AISWSAGRTYYADSMKG (SEQ ID NO: 487), and CDR3 comprises the amino acid sequence DPWTSDSDYDRLTMYDY (SEQ ID NO: 499);
e) CDR1 comprises the amino acid sequence TYTMG (SEQ ID NO: 480), CDR2 comprises the amino acid sequence AISWSAGRTYYADSMKG (SEQ ID NO: 487), and CDR3 comprises the amino acid sequence DPWTSDSDYDRLTMYDY (SEQ ID NO: 499);
f) CDR1 comprises the amino acid sequence TYTMG (SEQ ID NO: 480), CDR2 comprises the amino acid sequence AISWSAGRTYYADSMKG (SEQ ID NO: 487), and CDR3 comprises the amino acid sequence DPWTSDSDYDRLTMYDY (SEQ ID NO: 499);
g) CDR1 comprises the amino acid sequence SYTMG (SEQ ID NO: 479), CDR2 comprises the amino acid sequence AISWSAGRTYYADSMKG (SEQ ID NO: 487), and CDR3 comprises the amino acid sequence DPWTSDSDYDRLTMYDY (SEQ ID NO: 499);
h) CDR1 comprises the amino acid sequence TYTMG (SEQ ID NO: 480), CDR2 comprises the amino acid sequence AISWSAGRTYYADSMKG (SEQ ID NO: 487), and CDR3 comprises the amino acid sequence DPWTSDSDYDRLTMYDY (SEQ ID NO: 499);
i) CDR1 comprises the amino acid sequence TYTMG (SEQ ID NO: 480), CDR2 comprises the amino acid sequence AISWSAGRTYYADSMKG (SEQ ID NO: 487), and CDR3 comprises the amino acid sequence DPWTSDSDYDRLTMYDY (SEQ ID NO: 499);
j) CDR1 comprises the amino acid sequence SYAMG (SEQ ID NO: 481), CDR2 comprises the amino acid sequence VISWSGGRTYYADSVKG (SEQ ID NO: 488), and CDR3 comprises the amino acid sequence DPWTSDSDYERLTMYDY (SEQ ID NO: 500);
k) CDR1 comprises the amino acid sequence SYAMG (SEQ ID NO: 481), CDR2 comprises the amino acid sequence VISWSGGRTYYADSVKG (SEQ ID NO: 488), and CDR3 comprises the amino acid sequence DPWTSDSDYERLTMYDY (SEQ ID NO: 500);
l) CDR1 comprises the amino acid sequence SYAMG, CDR2 comprises the amino acid sequence VISWSGGRTYYADSVKG (SEQ ID NO: 488), and CDR3 comprises the amino acid sequence DPWTSDSDYERLTMYDY (SEQ ID NO: 500);
m) CDR1 comprises the amino acid sequence SYAMG, CDR2 comprises the amino acid sequence VISWSGGRTYYADSVKG (SEQ ID NO: 488), and CDR3 comprises the amino acid sequence DPWTSDSDYERLTMYDY (SEQ ID NO: 500);
n) CDR1 comprises the amino acid sequence TYNMG (SEQ ID NO: 482), CDR2 comprises the amino acid sequence AIDLYGRATRYANSVKG (SEQ ID NO: 489), and CDR3 comprises the amino acid sequence DTSLPLGVLTESQRLYGA (SEQ ID NO: 501);
o) CDR1 comprises the amino acid sequence TYNMG (SEQ ID NO: 482), CDR2 comprises the amino acid sequence AINLEGYATRYANSVKG (SEQ ID NO: 615), and CDR3 comprises the amino acid sequence DTSLPLGVLTESQRLYGA (SEQ ID NO: 501);
p) CDR1 comprises the amino acid sequence TYNMG (SEQ ID NO: 482), CDR2 comprises the amino acid sequence AIDLYGRATRYANSVKG (SEQ ID NO: 489), and CDR3 comprises the amino acid sequence DTSLPLGVLTESQRLYGA (SEQ ID NO: 501);
q) CDR1 comprises the amino acid sequence TYNMG (SEQ ID NO: 482), CDR2 comprises the amino acid sequence AIDLYGRATRYANSVRG (SEQ ID NO: 616), and CDR3 comprises the amino acid sequence DTSLPLGVLTESQRLYGA (SEQ ID NO: 501);
r) CDR1 comprises the amino acid sequence TYNMG (SEQ ID NO: 482), CDR2 comprises the amino acid sequence AIDLYGRATRYANSVKG (SEQ ID NO: 489), and CDR3 comprises the amino acid sequence DTSLPLGVLTESQRLYGA (SEQ ID NO: 501);
s) CDR1 comprises the amino acid sequence TYNMG (SEQ ID NO: 482), CDR2 comprises the amino acid sequence AIDLYGRATRYANSVKG (SEQ ID NO: 489), and CDR3 comprises the amino acid sequence DTSLPLGVLTKSQRMYGA (SEQ ID NO: 502);
t) CDR1 comprises the amino acid sequence AYAMG, CDR2 comprises the amino acid sequence AINWNGDTALRWNGFATRYADSVKG (SEQ ID NO: 490), and CDR3 comprises the amino acid sequence DTVVSGSYYLAARAEDYEY (SEQ ID NO: 503);
u) CDR1 comprises the amino acid sequence AYAMG, CDR2 comprises the amino acid sequence AINWNGDTALRWNGFATRYADSVKG (SEQ ID NO: 490), and CDR3 comprises the amino acid sequence DTVVSGSYYLAARAEDYEY (SEQ ID NO: 503);
v) CDR1 comprises the amino acid sequence AYAMG, CDR2 comprises the amino acid sequence AINWNGDTALRWNGFATRYADSVKG (SEQ ID NO: 490), and CDR3 comprises the amino acid sequence DTVVSGSYYLAARAEDYEY (SEQ ID NO: 503);
w) CDR1 comprises the amino acid sequence AYAMG, CDR2 comprises the amino acid sequence AINWNGDTALRWNGFATRYADSVKG (SEQ ID NO: 490), and CDR3 comprises the amino acid sequence DTVVSGSYYLAARAEDYEY (SEQ ID NO: 503);
x) CDR1 comprises the amino acid sequence SSGMG (SEQ ID NO: 484), CDR2 comprises the amino acid sequence SMDWSGGSTYYGDSVKG (SEQ ID NO: 491), and CDR3 comprises the amino acid sequence GTSGVAAVNLRGFFS (SEQ ID NO: 504);
y) CDR1 comprises the amino acid sequence SSGMG (SEQ ID NO: 484), CDR2 comprises the amino acid sequence SIDWSGGSTYYGDSVKG (SEQ ID NO: 492), and CDR3 comprises the amino acid sequence GTSGVAAVNLRGFFS (SEQ ID NO: 504);
z) CDR1 comprises the amino acid sequence SSGMG (SEQ ID NO: 484), CDR2 comprises the amino acid sequence SMDWSGGSTYYGDSVKG (SEQ ID NO: 491), and CDR3 comprises the amino acid sequence GTSGVAAVNLRGFFS (SEQ ID NO: 504);
aa) CDR1 comprises the amino acid sequence SSGMG (SEQ ID NO: 484), CDR2 comprises the amino acid sequence SIDWGGGSTYYGDSVKG (SEQ ID NO: 493), and CDR3 comprises the amino acid sequence GTSGVAAVNLRGFFS (SEQ ID NO: 504);
ab) CDR1 comprises the amino acid sequence SSGMG (SEQ ID NO: 484), CDR2 comprises the amino acid sequence SIDWSGGSTYYGDSVKG (SEQ ID NO: 492), and CDR3 comprises the amino acid sequence GTSGVAAVNLRGFFS (SEQ ID NO: 504);
ac) CDR1 comprises the amino acid sequence SSGMG (SEQ ID NO: 484), CDR2 comprises the amino acid sequence SIDWSGKSTYYGDSVKG (SEQ ID NO: 494), and CDR3 comprises the amino acid sequence GTSGVAAVNLRGFFS (SEQ ID NO: 504);
ad) CDR1 comprises the amino acid sequence SSGMG (SEQ ID NO: 484), CDR2 comprises the amino acid sequence SINWSGGSAYYGDSVKG (SEQ ID NO: 495), and CDR3 comprises the amino acid sequence GTSGVAAVNLRGFFS (SEQ ID NO: 504);
ae) CDR1 comprises the amino acid sequence SSGMG (SEQ ID NO: 484), CDR2 comprises the amino acid sequence SMDWSGGSTYYGDSVKG (SEQ ID NO: 491), and CDR3 comprises the amino acid sequence GTSGVAAVNLRGFFS (SEQ ID NO: 504);
af) CDR1 comprises the amino acid sequence SSGMG (SEQ ID NO: 484), CDR2 comprises the amino acid sequence SMDWTGGSTYYGDSVKG (SEQ ID NO: 496), and CDR3 comprises the amino acid sequence GTSGVAAVNLRGFFS (SEQ ID NO: 504);
ag) CDR1 comprises the amino acid sequence VDATT (SEQ ID NO: 485), CDR2 comprises the amino acid sequence IMDIGGVTEYADSVKG (SEQ ID NO): 497), and CDR3 comprises the amino acid sequence RGL;
ah) CDR1 comprises the amino acid sequence INVIG (SEQ ID NO: 505), CDR2 comprises the amino acid sequence LVNSGGQTHYADSVKG (SEQ ID NO: 516), and CDR3 comprises the amino acid sequence RYGIDNY (SEQ ID NO: 528);
ai) CDR1 comprises the amino acid sequence SSFMS (SEQ ID NO: 506), CDR2 comprises the amino acid sequence TIYSDGSTYYADSVKG (SEQ ID NO: 517), and CDR3 comprises the amino acid sequence VTGSI (SEQ ID NO: 529);
aj) CDR1 comprises the amino acid sequence SSFMS (SEQ ID NO: 506), CDR2 comprises the amino acid sequence TIYSDGSTYYADSMKG (SEQ ID NO: 518), and CDR3 comprises the amino acid sequence VTGSI (SEQ ID NO: 529);
ak) CDR1 comprises the amino acid sequence TNVMG (SEQ ID NO: 507), CDR2 comprises the amino acid sequence LIRGGGSTHYADSVKG (SEQ ID NO: 519), and CDR3 comprises the amino acid sequence WLGSPGAMSDY (SEQ ID NO: 530);
al) CDR1 comprises the amino acid sequence TNNMG (SEQ ID NO: 508), CDR2 comprises the amino acid sequence LIRTGGSTHVADSMKG (SEQ ID NO: 520), and CDR3 comprises the amino acid sequence WTGSPGALSDY (SEQ ID NO: 531);
am) CDR1 comprises the amino acid sequence TNNMA (SEQ ID NO: 509), CDR2 comprises the amino acid sequence LIRTGGSTHVADSMKG (SEQ ID NO: 520), and CDR3 comprises the amino acid sequence WTGSPGALSDY (SEQ ID NO: 531);
an) CDR1 comprises the amino acid sequence RVAMN (SEQ ID NO: 510), CDR2 comprises the amino acid sequence TISSDGSRTNYAHSVKG (SEQ ID NO: 522), and CDR3 comprises the amino acid sequence PGNS (SEQ ID NO: 532);
ao) CDR1 comprises the amino acid sequence RVGMN (SEQ ID NO: 511), CDR2 comprises the amino acid sequence SISSDGSRTNYAHFVKG (SEQ ID NO: 523), and CDR3 comprises the amino acid sequence PGNS (SEQ ID NO: 532);
ap) CDR1 comprises the amino acid sequence FVGWG (SEQ ID NO: 512), CDR2 comprises the amino acid sequence QISTGGLTNYADSVKG (SEQ ID NO: 524), and CDR3 comprises the amino acid sequence PGHP (SEQ ID NO: 533);
aq) CDR1 comprises the amino acid sequence FIGWG (SEQ ID NO: 513), CDR2 comprises the amino acid sequence QINTGGLTDYADSVKG (SEQ ID NO: 525), and CDR3 comprises the amino acid sequence PGHS (SEQ ID NO: 534);
ar) CDR1 comprises the amino acid sequence MYSMS (SEQ ID NO: 514), CDR2 comprises the amino acid sequence SISTGARDTAYADSVKG (SEQ ID NO: 526), and CDR3 comprises the amino acid sequence GDLRYGPDGYDY (SEQ ID NO: 535);
as) CDR1 comprises the amino acid sequence MYSMS (SEQ ID NO: 514), CDR2 comprises the amino acid sequence SISTGARDTAYADSVKG (SEQ ID NO: 526), and CDR3 comprises the amino acid sequence GDLRYGPDGYDY (SEQ ID NO: 535);
at) CDR1 comprises the amino acid sequence MYSMS (SEQ ID NO: 514), CDR2 comprises the amino acid sequence SISTGARDTSYADSVKG (SEQ ID NO: 618), and CDR3 comprises the amino acid sequence GDLRYGPDGYDY (SEQ ID NO: 535); or
au) CDR1 comprises the amino acid sequence TYGMG (SEQ ID NO: 515), CDR2 comprises the amino acid sequence VITGSGVGTQYADSVKD (SEQ ID NO: 527), and CDR3 comprises the amino acid sequence GHRPGWAVIRADAYEY (SEQ ID NO: 536).

3. The VHH antibody of claim 1, wherein:
a) FR1 comprises the following amino acid sequence:
X₁X₂QLX₃ESGGX₄VQX₅GX₆SX₇RLX₈CX₉X₁₀SGX₁₁X₁₂X₁₃X₁₄ (SEQ ID NO: 604), wherein
X₁ is E or Q;
X₂ is L or V;
X₃ is V or Q;
X₄ is L or S;
X₅ is P or A;
X₆ is A, E, or G;
X₇ is L, R, or V;
X₈ is A or S;
X₉ is A or V;
X₁₀ is A, T, or V;
X₁₁ is A, D, F, G, I, P, R, or S;
X₁₂ is A, D, I, N, P, S, T, or V;
X₁₃ is A, F, null, S, or V; and
X₁₄ is I, L, null, or S;
b) FR2 comprises the amino acid sequence:
WX₁₅RX₁₆APGX₁₇X₁₈X₁₉X₂₀X₂₁VX₂₂ (SEQ ID NO: 605), wherein
X₁₅ is F, V, or Y;
X₁₆ is H or Q;
X₁₇ is E or K;
X₁₈ A, D, E, G, R, or Q;
X₁₉ is L or R;
X₂₀ is D or E;
X₂₁ is F, L, V, or W; and
X₂₂ is A or S;
c) FR3 comprises the amino acid sequence:
RFX₂₃X₂₄SRX₂₅X₂₆X₂₇X₂₈X₂₉X₃₀X₃₁X₃₂LX₃₃MX₃₄X₃₅LX₃₆X₃₇EDTAX₃₈YYCX₃₉X₄₀ (SEQ ID NO: 606), wherein
X₂₃ is A, I, or T;
X₂₄ is I or V;
X₂₅ is D, E, or V;
X₂₆ is H, I, or N;
X₂₇ is A or T;
X₂₈ is D or K;
X₂₉ is K, M, N, R, S, or T;
X₃₀ is A, M, or T;
X₃₁ is A, L, or V;
X₃₂ is F, H, N, or Y;
X₃₃ is H or Q;
X₃₄ is N or S;
X₃₅ is G, N, S, or T;
X₃₆ is K or R;
X₃₇ is A, F, L, P, or V;
X₃₈ is V or E;
X₃₉ is A, H, N, or V; and
X₄₀ is A, E, F, G, I, N, R, T, or V; and/or
d) FR4 comprises the amino acid sequence:
X₄₀GX₄₁GTX₄₂VX₄₃VX₄₄S (SEQ ID NO: 607), wherein
X₄₀ is R or W;
X₄₁ is Q, E, or P;
X₄₂ is L or Q;
X₄₃ is S or T; and
X₄₄ is S or V.

4. The VHH antibody of claim 1, wherein:
a) FR1 comprises an amino acid sequence selected from the group consisting of:
(SEQ ID NO: 537)
QVQLVESGGGLVQPGGSLRLSCAASGRTFI,
(SEQ ID NO: 538)
EVQLVESGGGLVQAGGSLRLSCAASGRTFG,
(SEQ ID NO: 543)
QVQLQESGGGLVQAGGSLRLSCAASGRTFG,
(SEQ ID NO: 619)
QVQLVESGGGLVQAGGSLRLSCAASGRTFG,
(SEQ ID NO: 544)
EVQLVESGGGLVQAGGSLRLSCAASGGTVS,
(SEQ ID NO: 545)
EVQLVESGGGLVQAGGSRRLSCAASGGTVS,
(SEQ ID NO: 546)
QVQLVESGGGLVQAGGSLRLSCAASGGTVS,
(SEQ ID NO: 548)
EVQLVESGGGLVQAGASLRLSCAASGRT,
(SEQ ID NO: 549)
QVQLQESGGGLVQAGASLRLSCAASGRA,
(SEQ ID NO: 550)
QVQLQESGGGLVQAGASLRLSCAASGRT,
(SEQ ID NO: 551)
QVQLVESGGGLVQAGASLRLSCAASGRT,
(SEQ ID NO: 554)
QVQLQESGGGSVQAGGSLRLSCAASGRAFS,
(SEQ ID NO: 559)
EVQLVESGGGLVQAGGSLRLSCAASGPAFS,
(SEQ ID NO: 560)
QVQLQESGGGLVQAGGSLRLSCAASGPAFS,
(SEQ ID NO: 561)
QVQLVESGGGLVQAGGSLRLACAASGAAFS,
(SEQ ID NO: 562)
QVQLVESGGGLVQAGGSLRLSCAASGPAFS,
(SEQ ID NO: 569)
QLQLVESGGGLVQPGGSLRLSCAASGSDFL,
(SEQ ID NO: 573)
QVQLQESGGGLVQAGGSLRLSCATSGITSS,
(SEQ ID NO: 577)
EVQLVESGGGLVQPGGSLRLSCAASGFPFS,
(SEQ ID NO: 578)
QVQLVESGGGLVQPGGSLRLSCAASGFNFS,
(SEQ ID NO: 584)
QVQLVESGGGLVQPGGSVRLSCATSGSIFS,
(SEQ ID NO: 587)
EVQLVESGGGLVQPGGSLRLSCAASGSVVS,
(SEQ ID NO: 588)
QVQLVESGGGLVQPGGSLRLSCAASGSDAS,
(SEQ ID NO: 590)
QLQLVESGGGLVQPGESLRLSCAASGFSFS,
(SEQ ID NO: 594)
QLQLVESGGGLVQPGESLRLSCVVSGDIFS,
(SEQ ID NO: 597)
QVQLVESGGGLVQPGESLRLSCVVSGDIFS,
(SEQ ID NO: 599)
QVQLVESGGGLVQPGGSLRLSCAASGFTFS,
and
(SEQ ID NO: 602)
QVQLVESGGGLVQPGGSLRLSCVASGGTFS;
b) FR2 comprises an amino acid sequence selected from the group consisting of:
```
  (SEQ ID NO: 539)
WFRQAPGKEREFVA,
  (SEQ ID NO: 620)
WFRQAPGKGREFVA,
  (SEQ ID NO: 621)
WFRQAPGREREFVA,
(SEQ ID NO: 552)
WFRHAPGKDREFVA,
  (SEQ ID NO: 553)
WFRHAPGEDREFVA,
  (SEQ ID NO: 563)
WFRQAPGKARDFVA,
  (SEQ ID NO: 567)
WFRQAPGKAREFVA,
  (SEQ ID NO: 570)
WFRQAPGNQREFVA,
  (SEQ ID NO: 574)
WYRQAPGKQRELVA,
  (SEQ ID NO: 579)
WVRQAPGKGLEWVS,
  (SEQ ID NO: 580)
WVRQAPGKEVEWVS,
  (SEQ ID NO: 585)
WYRQAPGKEREFVA,
  (SEQ ID NO: 591)
WYRQAPGKERELVA,
  (SEQ ID NO: 595)
WYRQAPGKQREVVA,
and
  (SEQ ID NO: 600)
WVRQAPGKRLEWVS;
```
c) FR3 comprises an amino acid sequence selected from the group consisting of:
```
(SEQ ID NO: 540)
RFTISRDNAKSTVYLQMNSLRPEDTAVYYCAE,
(SEQ ID NO: 541)
RFTISRDNAKNTVYLQMNSLKPEDTAVYYCAA,
(SEQ ID NO: 547)
RFTISRDNAKNTVNLQMNSLKPEDTAVYYCAA,
(SEQ ID NO: 555)
RFIISRVNAKNTVNLQMNSLKPEDTAVYYCAA,
(SEQ ID NO: 556)
RFTISRVIAKNTVNLQMNSLKPEDTAVYYCAA,
(SEQ ID NO: 558)
RFTISRVNAKNTVNLQMNSLKPEDTAVYYCAA,
(SEQ ID NO: 564)
RFTVSRDNAKNTVHLQMNSLRPEDTAVYYCAR,
(SEQ ID NO: 565)
RFTVSRDNAKNAVHLQMNSLRPEDTAVYYCAR,
(SEQ ID NO: 568)
RFTVSRDNAKMTVHLQMNSLRPEDTAVYYCAR,
(SEQ ID NO: 571)
RFTISRDHTKNTVYLQMNSLKVEDTAVYYCNT,
(SEQ ID NO: 575)
RFTISRDNAKNTVFLQMNSLKPEDTAEYYCHG,
(SEQ ID NO: 581)
RFTISRDNAKKTAYLQMNSLKAEDTAVYYCAT,
(SEQ ID NO: 582)
RFTISRDNAKNTVYLQMSNLKAEDTAVYYCAT,
(SEQ ID NO: 586)
RFIISRENAKTTVYLQMNGLKPEDTAVYYCVI,
(SEQ ID NO: 589)
RFTISRENAKNTVYLQMNSLKPEDTAVYYCVI,
(SEQ ID NO: 592)
RFTISRENAKNMVYLQMNSLKLEDTAVYYCNV,
(SEQ ID NO: 593)
RFTISRDNVKNMVYLQMNSLKLEDTAVYYCNV,
(SEQ ID NO: 596)
RFAISRDNAKRTVYLQMNSLKFEDTAVYYCNV,
(SEQ ID NO: 598)
RFTISRDNAKRTVYLQMNSLKFEDTAVYYCNF,
  (SEQ ID NO: 601)
RFTISRDNADNTLYLHMNNLKPEDTAVYYCAN,
and
  (SEQ ID NO: 603)
RFTISRENAKNTVYLQMNTLKLEDTAVYYCVS;
```
and/or
d) FR4 comprises an amino acid sequence selected from the group consisting of:
```
  (SEQ ID NO: 542)
WGQGTQVTVSS,
  (SEQ ID NO: 557)
WGOGTQVSVSS,
(SEQ ID NO: 566)
WGPGTQVTVSS,
  (SEQ ID NO: 572)
WGQGTLVTVSS,
  (SEQ ID NO: 576)
WGEGTQVTVSS,
  (SEQ ID NO: 583)
RGQGTQVTVSS,
and
  (SEQ ID NO: 622)
RGQGTQVTVVS.
```

5. The VHH antibody of claim 1, wherein:
a) FR1 comprises the amino acid sequence QVQLVESGGGLVQPGGSLRLSCAASGRTFI (SEQ ID NO: 537), FR2 comprises the amino acid sequence WFRQAPGKEREFVA (SEQ ID NO: 539), FR3 comprises the amino acid sequence RFTISRDNAKSTVYLQMNSLRPEDTAVYYCAE (SEQ ID NO: 540), and FR4 comprises the amino acid sequence WGQGTQVTVSS (SEQ ID NO: 542);
b) FR1 comprises the amino acid sequence EVOLVESGGGLVQAGGSLRLSCAASGRTFG (SEQ ID NO: 538), FR2 comprises the amino acid sequence WFRQAPGKEREFVA (SEQ ID NO: 539), FR3 comprises the amino acid sequence RFTISRDNAKNTVYLQMNSLKPEDTAVYYCAA (SEQ ID NO: 541), and FR4 comprises the amino acid sequence WGQGTQVTVSS (SEQ ID NO: 542);
c) FR1 comprises the amino acid sequence EVOLVESGGGLVQAGGSLRLSCAASGRTFG (SEQ ID NO: 538), FR2 comprises the amino acid sequence WFRQAPGKEREFVA (SEQ ID NO: 539), FR3 comprises the amino acid sequence RFTISRDNAKNTVYLQMNSLKPEDTAVYYCAA (SEQ ID NO: 541), and FR4 comprises the amino acid sequence WGQGTQVTVSS (SEQ ID NO: 542);
d) FR1 comprises the amino acid sequence QVQLQESGGGLVQAGGSLRLSCAASGRTFG (SEQ ID NO: 543), FR2 comprises the amino acid sequence WFRQAPGKEREFVA (SEQ ID NO: 539), FR3 comprises the amino acid sequence RFTISRDNAKNTVYLQMNSLKPEDTAVYYCAA (SEQ ID NO: 541), and FR4 comprises the amino acid sequence WGQGTQVTVSS (SEQ ID NO: 542);
e) FR1 comprises the amino acid sequence QVQLQESGGGLVQAGGSLRLSCAASGRTFG (SEQ ID NO: 543), FR2 comprises the amino acid sequence WFRQAPGKEREFVA (SEQ ID NO: 539), FR3 comprises the amino acid sequence RFTISRDNAKNTVYLQMNSLKPEDTAVYYCAA (SEQ ID NO: 541), and FR4 comprises the amino acid sequence WGQGTQVTVSS (SEQ ID NO: 542);
f) FR1 comprises the amino acid sequence QVQLQESGGGLVQAGGSLRLSCAASGRTFG (SEQ ID NO: 543), FR2 comprises the amino acid sequence WFRQAPGKGREFVA (SEQ ID NO: 620), FR3 comprises the amino acid sequence RFTISRDNAKNTVYLQMNSLKPEDTAVYYCAA (SEQ ID NO: 541), and FR4 comprises the amino acid sequence WGQGTQVTVSS (SEQ ID NO: 542);
g) FR1 comprises the amino acid sequence QVQLVESGGGLVQAGGSLRLSCAASGRTFG (SEQ ID NO: 619), FR2 comprises the amino acid sequence WFRQAPGKEREFVA (SEQ ID NO: 539), FR3 comprises the amino acid sequence RFTISRDNAKNTVYLQMNSLKPEDTAVYYCAA (SEQ ID NO: 541), and FR4 comprises the amino acid sequence WGQGTQVTVSS (SEQ ID NO: 542);
h) FR1 comprises the amino acid sequence QVQLVESGGGLVQAGGSLRLSCAASGRTFG (SEQ ID NO: 619), FR2 comprises the amino acid sequence WFRQAPGKEREFVA (SEQ ID NO: 539), FR3 comprises the amino acid sequence RFTISRDNAKNTVYLQMNSLKPEDTAVYYCAA (SEQ ID NO: 541), and FR4 comprises the amino acid sequence WGQGTQVTVSS (SEQ ID NO: 542);
i) FR1 comprises the amino acid sequence QVQLVESGGGLVQAGGSLRLSCAASGRTFG (SEQ ID NO: 619), FR2 comprises the amino acid sequence WFRQAPGREREFVA (SEQ ID NO: 621), FR3 comprises the amino acid sequence RFTISRDNAKNTVYLQMNSLKPEDTAVYYCAA (SEQ ID NO: 541), and FR4 comprises the amino acid sequence WGQGTQVTVSS (SEQ ID NO: 542);
j) FR1 comprises the amino acid sequence EVOLVESGGGLVQAGGSLRLSCAASGGTVS (SEQ ID NO: 544), FR2 comprises the amino acid sequence WFRQAPGKEREFVA (SEQ ID NO: 539), FR3 comprises the amino acid sequence RFTISRDNAKNTVNLQMNSLKPEDTAVYYCAA (SEQ ID NO: 547), and FR4 comprises the amino acid sequence WGQGTQVTVSS (SEQ ID NO: 542);
k) FR1 comprises the amino acid sequence EVOLVESGGGLVQAGGSRRLSCAASGGTVS (SEQ ID NO: 545), FR2 comprises the amino acid sequence WFRQAPGKEREFVA (SEQ ID NO: 539), FR3 comprises the amino acid sequence RFTISRDNAKNTVYLQMNSLKPEDTAVYYCAA (SEQ ID NO: 541), and FR4 comprises the amino acid sequence WGQGTQVTVSS (SEQ ID NO: 542);
l) FR1 comprises the amino acid sequence QVQLVESGGGLVQAGGSLRLSCAASGGTVS (SEQ ID NO: 546), FR2 comprises the amino acid sequence WFRQAPGKEREFVA (SEQ ID NO: 539), FR3 comprises the amino acid sequence RFTISRDNAKNTVNLQMNSLKPEDTAVYYCAA (SEQ ID NO: 547), and FR4 comprises the amino acid sequence WGQGTQVTVSS (SEQ ID NO: 542);
m) FR1 comprises the amino acid sequence QVQLVESGGGLVQAGGSLRLSCAASGGTVS (SEQ ID NO: 546), FR2 comprises the amino acid sequence WFRQAPGKEREFVA (SEQ ID NO: 539), FR3 comprises the amino acid sequence RFTISRDNAKNTVYLQMNSLKPEDTAVYYCAA (SEQ ID NO: 541), and FR4 comprises the amino acid sequence WGQGTQVTVSS (SEQ ID NO: 542);
n) FR1 comprises the amino acid sequence EVOLVESGGGLVQAGASLRLSCAASGRT (SEQ ID NO: 548), FR2 comprises the amino acid sequence WFRHAPGKDREFVA (SEQ ID NO: 552), FR3 comprises the amino acid sequence RFTISRDNAKNTVYLQMNSLKPEDTAVYYCAA (SEQ ID NO: 541), and FR4 comprises the amino acid sequence WGQGTQVTVSS (SEQ ID NO: 542);
o) FR1 comprises the amino acid sequence QVQLQESGGGLVQAGASLRLSCAASGRA (SEQ ID NO: 549), FR2 comprises the amino acid sequence WFRHAPGEDREFVA (SEQ ID NO: 553), FR3 comprises the amino acid sequence RFTISRDNAKNTVYLQMNSLKPEDTAVYYCAA (SEQ ID NO: 541), and FR4 comprises the amino acid sequence WGQGTQVTVSS (SEQ ID NO: 542);
p) FR1 comprises the amino acid sequence QVQLQESGGGLVQAGASLRLSCAASGRT (SEQ ID NO: 550), FR2 comprises the amino acid sequence WFRHAPGKDREFVA (SEQ ID NO: 552), FR3 comprises the amino acid sequence RFTISRDNAKNTVYLQMNSLKPEDTAVYYCAA (SEQ ID NO: 541), and FR4 comprises the amino acid sequence WGQGTQVTVSS (SEQ ID NO: 542);
q) FR1 comprises the amino acid sequence QVQLQESGGGLVQAGASLRLSCAASGRT (SEQ ID NO: 550), FR2 comprises the amino acid sequence WFRHAPGKDREFVA (SEQ ID NO: 552), FR3 comprises the amino acid sequence RFTISRDNAKNTVYLQMNSLKPEDTAVYYCAA (SEQ ID NO: 541), and FR4 comprises the amino acid sequence WGQGTQVTVSS (SEQ ID NO: 542);
r) FR1 comprises the amino acid sequence QVQLVESGGGLVQAGASLRLSCAASGRT (SEQ ID NO: 551), FR2 comprises the amino acid sequence WFRHAPGKDREFVA (SEQ ID NO: 552), FR3 comprises the amino acid sequence RFTISRDNAKNTVYLQMNSLKPEDTAVYYCAA (SEQ ID NO: 541), and FR4 comprises the amino acid sequence WGQGTQVTVSS (SEQ ID NO: 542);
s) FR1 comprises the amino acid sequence QVQLVESGGGLVQAGASLRLSCAASGRT (SEQ ID NO: 551), FR2 comprises the amino acid sequence WFRHAPGKDREFVA (SEQ ID NO: 552), FR3 comprises the amino acid sequence RFTISRDNAKNTVYLQMNSLKPEDTAVYYCAA (SEQ ID NO: 541), and FR4 comprises the amino acid sequence WGQGTQVTVSS (SEQ ID NO: 542);
t) FR1 comprises the amino acid sequence QVQLQESGGGSVQAGGSLRLSCAASGRAFS (SEQ ID NO: 554), FR2 comprises the amino acid sequence WFRQAPGKEREFVA (SEQ ID NO: 539), FR3 comprises the amino acid sequence RFIISRVNAKNTVNLQMNSLKPEDTAVYYCAA (SEQ ID NO: 555), and FR4 comprises the amino acid sequence WGQGTQVSVSS (SEQ ID NO: 557);
u) FR1 comprises the amino acid sequence QVQLQESGGGSVQAGGSLRLSCAASGRAFS (SEQ ID NO: 554), FR2 comprises the amino acid sequence WFRQAPGKEREFVA (SEQ ID NO: 539), FR3 comprises the amino acid sequence RFTISRVIAKNTVNLQMNSLKPEDTAVYYCAA (SEQ ID NO: 556), and FR4 comprises the amino acid sequence WGQGTQVTVSS (SEQ ID NO: 542);
v) FR1 comprises the amino acid sequence QVQLQESGGGSVQAGGSLRLSCAASGRAFS (SEQ ID NO: 554), FR2 comprises the amino acid sequence WFRQAPGKEREFVA (SEQ ID NO: 539), FR3 comprises the amino acid sequence RFTISRVNAKNTVNLQMNSLKPEDTAVYYCAA (SEQ ID NO: 558), and FR4 comprises the amino acid sequence WGQGTQVSVSS (SEQ ID NO: 557);
w) FR1 comprises the amino acid sequence QVQLQESGGGSVQAGGSLRLSCAASGRAFS (SEQ ID NO: 554), FR2 comprises the amino acid sequence WFRQAPGKEREFVA (SEQ ID NO: 539), FR3 comprises the amino acid sequence RFTISRVNAKNTVNLQMNSLKPEDTAVYYCAA (SEQ ID NO: 558), and FR4 comprises the amino acid sequence WGQGTQVTVSS (SEQ ID NO: 542);
x) FR1 comprises the amino acid sequence EVOLVESGGGLVQAGGSLRLSCAASGPAFS (SEQ ID NO: 559), FR2 comprises the amino acid sequence WFRQAPGKARDFVA (SEQ ID NO: 563), FR3 comprises the amino acid sequence RFTVSRDNAKNTVHLQMNSLRPEDTAVYYCAR (SEQ ID NO: 564), and FR4 comprises the amino acid sequence WGPGTQVTVSS (SEQ ID NO: 566);
y) FR1 comprises the amino acid sequence QVQLQESGGGLVQAGGSLRLSCAASGPAFS (SEQ ID NO: 560), FR2 comprises the amino acid sequence WFRQAPGKARDFVA (SEQ ID NO: 563), FR3 comprises the amino acid sequence RFTVSRDNAKNTVHLQMNSLRPEDTAVYYCAR (SEQ ID NO: 564), and FR4 comprises the amino acid sequence WGPGTQVTVSS (SEQ ID NO: 566);
z) FR1 comprises the amino acid sequence QVQLVESGGGLVQAGGSLRLACAASGAAFS (SEQ ID NO: 561), FR2 comprises the amino acid sequence WFRQAPGKARDEVA (SEQ ID NO: 563), FR3 comprises the amino acid sequence RFTVSRDNAKNTVHLQMNSLRPEDTAVYYCAR (SEQ ID NO: 564), and FR4 comprises the amino acid sequence WGPGTQVTVSS (SEQ ID NO: 566);
aa) FR1 comprises the amino acid sequence QVQLVESGGGLVQAGGSLRLSCAASGPAFS (SEQ ID NO: 562), FR2 comprises the amino acid sequence WFRQAPGKARDFVA (SEQ ID NO: 563), FR3 comprises the amino acid sequence RFTVSRDNAKNAVHLQMNSLRPEDTAVYYCAR (SEQ ID NO: 565), and FR4 comprises the amino acid sequence WGPGTQVTVSS (SEQ ID NO: 566);
ab) FR1 comprises the amino acid sequence QVQLVESGGGLVQAGGSLRLSCAASGPAFS (SEQ ID NO: 562), FR2 comprises the amino acid sequence WFRQAPGKARDFVA (SEQ ID NO: 563), FR3 comprises the amino acid sequence RFTVSRDNAKNTVHLQMNSLRPEDTAVYYCAR (SEQ ID NO: 564), and FR4 comprises the amino acid sequence WGPGTQVTVSS (SEQ ID NO: 566);
ac) FR1 comprises the amino acid sequence QVQLVESGGGLVQAGGSLRLSCAASGPAFS (SEQ ID NO: 562), FR2 comprises the amino acid sequence WFRQAPGKARDFVA (SEQ ID NO: 563), FR3 comprises the amino acid sequence RFTVSRDNAKNTVHLQMNSLRPEDTAVYYCAR (SEQ ID NO: 564), and FR4 comprises the amino acid sequence WGPGTQVTVSS (SEQ ID NO: 566);
ad) FR1 comprises the amino acid sequence QVQLVESGGGLVQAGGSLRLSCAASGPAFS (SEQ ID NO: 562), FR2 comprises the amino acid sequence WFRQAPGKARDFVA (SEQ ID NO: 563), FR3 comprises the amino acid sequence RFTVSRDNAKNTVHLQMNSLRPEDTAVYYCAR (SEQ ID NO: 564), and FR4 comprises the amino acid sequence WGPGTQVTVSS (SEQ ID NO: 566);
ae) FR1 comprises the amino acid sequence QVQLVESGGGLVQAGGSLRLSCAASGPAFS (SEQ ID NO: 562), FR2 comprises the amino acid sequence WFRQAPGKARDEVA (SEQ ID NO: 563), FR3 comprises the amino acid sequence RFTVSRDNAKNTVHLQMNSLRPEDTAVYYCAR (SEQ ID NO: 564), and FR4 comprises the amino acid sequence WGPGTQVTVSS (SEQ ID NO: 566);
af) FR1 comprises the amino acid sequence QVQLVESGGGLVQAGGSLRLSCAASGPAFS (SEQ ID NO: 562), FR2 comprises the amino acid sequence WFRQAPGKAREFVA (SEQ ID NO: 567), FR3 comprises the amino acid sequence RFTVSRDNAKMTVHLQMNSLRPEDTAVYYCAR (SEQ ID NO: 568), and FR4 comprises the amino acid sequence WGPGTQVTVSS (SEQ ID NO: 566);
ag) FR1 comprises the amino acid sequence QLQLVESGGGLVQPGGSLRLSCAASGSDFL (SEQ ID NO: 569), FR2 comprises the amino acid sequence WFRQAPGNQREFVA (SEQ ID NO: 570), FR3 comprises the amino acid sequence RFTISRDHTKNTVYLQMNSLKVEDTAVYYCNT (SEQ ID NO: 571), and FR4 comprises the amino acid sequence WGQGTLVTVSS (SEQ ID NO: 572);
ah) FR1 comprises the amino acid sequence QVQLQESGGGLVQAGGSLRLSCATSGITSS (SEQ ID NO: 573), FR2 comprises the amino acid sequence WYRQAPGKQRELVA (SEQ ID NO: 574), FR3 comprises the amino acid sequence RFTISRDNAKNTVFLQMNSLKPEDTAEYYCHG (SEQ ID NO: 575), and FR4 comprises the amino acid sequence WGEGTQVTVSS (SEQ ID NO: 576);
ai) FR1 comprises the amino acid sequence EVQLVESGGGLVQPGGSLRLSCAASGFPFS (SEQ ID NO: 577), FR2 comprises the amino acid sequence WVRQAPGKGLEWVS (SEQ ID NO: 579), FR3 comprises the amino acid sequence RFTISRDNAKKTAYLQMNSLKAEDTAVYYCAT (SEQ ID NO: 581), and FR4 comprises the amino acid sequence RGQGTQVTVSS (SEQ ID NO: 583);
aj) FR1 comprises the amino acid sequence QVQLVESGGGLVQPGGSLRLSCAASGENES (SEQ ID NO: 578), FR2 comprises the amino acid sequence WVRQAPGKEVEWVS (SEQ ID NO: 580), FR3 comprises the amino acid sequence RFTISRDNAKNTVYLQMSNLKAEDTAVYYCAT (SEQ ID NO: 582), and FR4 comprises the amino acid sequence RGQGTQVTVSS (SEQ ID NO: 583);
ak) FR1 comprises the amino acid sequence QVQLVESGGGLVQPGGSVRLSCATSGSIFS (SEQ ID NO: 584), FR2 comprises the amino acid sequence WYRQAPGKEREFVA (SEQ ID NO: 585), FR3 comprises the amino acid sequence RFIISRENAKTTVYLQMNGLKPEDTAVYYCVI (SEQ ID NO: 586), and FR4 comprises the amino acid sequence WGQGTQVTVSS (SEQ ID NO: 542);
al) FR1 comprises the amino acid sequence EVOLVESGGGLVQPGGSLRLSCAASGSVVS (SEQ ID NO: 587), FR2 comprises the amino acid sequence WYRQAPGKEREFVA (SEQ ID NO: 585), FR3 comprises the amino acid sequence RFTISRENAKNTVYLQMNSLKPEDTAVYYCVI (SEQ ID NO: 589), and FR4 comprises the amino acid sequence WGQGTQVTVSS (SEQ ID NO: 542);
am) FR1 comprises the amino acid sequence QVQLVESGGGLVQPGGSLRLSCAASGSDAS (SEQ ID NO: 588), FR2 comprises the amino acid sequence WYRQAPGKEREFVA (SEQ ID NO: 585), FR3 comprises the amino acid sequence RFTISRENAKNTVYLQMNSLKPEDTAVYYCVI (SEQ ID NO: 589), and FR4 comprises the amino acid sequence WGQGTQVTVSS (SEQ ID NO: 542);
an) FR1 comprises the amino acid sequence QLQLVESGGGLVQPGESLRLSCAASGFSFS (SEQ ID NO: 590), FR2 comprises the amino acid sequence WYRQAPGKERELVA (SEQ ID NO: 591), FR3 comprises the amino acid sequence RFTISRENAKNMVYLQMNSLKLEDTAVYYCNV (SEQ ID NO: 592), and FR4 comprises the amino acid sequence WGQGTQVTVSS (SEQ ID NO: 542);
ao) FR1 comprises the amino acid sequence QLQLVESGGGLVQPGESLRLSCAASGFSFS (SEQ ID NO: 590), FR2 comprises the amino acid sequence WYRQAPGKERELVA (SEQ ID NO: 591), FR3 comprises the amino acid sequence RFTISRDNVKNMVYLQMNSLKLEDTAVYYCNV (SEQ ID NO: 593), and FR4 comprises the amino acid sequence WGQGTQVTVSS (SEQ ID NO: 542);
ap) FR1 comprises the amino acid sequence QLQLVESGGGLVQPGESLRLSCVVSGDIFS (SEQ ID NO: 594), FR2 comprises the amino acid sequence WYRQAPGKQREVVA (SEQ ID NO: 595), FR3 comprises the amino acid sequence RFAISRDNAKRTVYLQMNSLKFEDTAVYYCNV (SEQ ID NO: 596), and FR4 comprises the amino acid sequence WGQGTQVTVSS (SEQ ID NO: 542);
aq) FR1 comprises the amino acid sequence QVQLVESGGGLVQPGESLRLSCVVSGDIFS (SEQ ID NO: 597), FR2 comprises the amino acid sequence WYRQAPGKQRELVA (SEQ ID NO: 574), FR3 comprises the amino acid sequence RFTISRDNAKRTVYLQMNSLKFEDTAVYYCNF (SEQ ID NO: 598), and FR4 comprises the amino acid sequence WGQGTQVTVSS (SEQ ID NO: 542);
ar) FR1 comprises the amino acid sequence QVQLVESGGGLVQPGGSLRLSCAASGFTFS (SEQ ID NO: 599), FR2 comprises the amino acid sequence WVRQAPGKRLEWVS (SEQ ID NO: 600), FR3 comprises the amino acid sequence RFTISRDNADNTLYLHMNNLKPEDTAVYYCAN (SEQ ID NO: 601), and FR4 comprises the amino acid sequence RGQGTQVTVSS (SEQ ID NO: 583);
as) FR1 comprises the amino acid sequence QVQLVESGGGLVQPGGSLRLSCAASGFTFS (SEQ ID NO: 599), FR2 comprises the amino acid sequence WVRQAPGKRLEWVS (SEQ ID NO: 600), FR3 comprises the amino acid sequence RFTISRDNADNTLYLHMNNLKPEDTAVYYCAN (SEQ ID NO: 601), and FR4 comprises the amino acid sequence RGQGTQVTVVS (SEQ ID NO: 622);
at) FR1 comprises the amino acid sequence QVQLVESGGGLVQPGGSLRLSCAASGFTFS (SEQ ID NO: 599), FR2 comprises the amino acid sequence WVRQAPGKRLEWVS (SEQ ID NO: 600), FR3 comprises the amino acid sequence RFTISRDNADNTLYLHMNNLKPEDTAVYYCAN (SEQ ID NO: 601), and FR4 comprises the amino acid sequence RGQGTQVTVSS (SEQ ID NO: 583); or
au) FR1 comprises the amino acid sequence QVQLVESGGGLVQPGGSLRLSCVASGGTFS, FR2 comprises the amino acid sequence WFRQAPGKEREFVA (SEQ ID NO: 539), FR3 comprises the amino acid sequence RFTISRENAKNTVYLQMNTLKLEDTAVYYCVS (SEQ ID NO: 603), and FR4 comprises the amino acid sequence WGQGTQVTVSS (SEQ ID NO: 542).

6. The VHH antibody of claim 1, wherein the VHH antibody comprises an amino acid sequence having at least 85% sequence identity to an amino acid sequence selected from the group consisting of:
```
  (SEQ ID NO: 431)
QVQLVESGGGLVQPGGSLRLSCAASGRTFINYAAGWFRQAPGKEREFVARISRSGGRTDYADSV
KGRFTISRDNAKSTVYLQMNSLRPEDTAVYYCAEATVWEFTDGADQYDYWGQGTQVTVSS;
(SEQ ID NO: 432)
EVQLVESGGGLVQAGGSLRLSCAASGRTFGSYTMGWFRQAPGKEREFVAAISWSAGRTYYADSM
KGRFTISRDNAKNTVYLQMNSLKPEDTAVYYCAADPWTSDSDYDRLTMYDYWGQGTQVTVSS;
(SEQ ID NO: 433)
EVQLVESGGGLVQAGGSLRLSCAASGRTFGTYTMGWFRQAPGKEREFVAAISWSAGRTYYADSM
KGRFTISRDNAKNTVYLQMNSLKPEDTAVYYCAADPWTSDSDYDRLTMYDYWGQGTQVTVSS;
(SEQ ID NO: 434)
QVQLQESGGGLVQAGGSLRLSCAASGRTFGSYTMGWFRQAPGKEREFVAAISWSAGRTYYADSM
KGRFTISRDNAKNTVYLQMNSLKPEDTAVYYCAADPWTSDSDYDRLTMYDYWGQGTQVTVSS;
(SEQ ID NO: 435)
QVQLQESGGGLVQAGGSLRLSCAASGRTFGTYTMGWFRQAPGKEREFVAAISWSAGRTYYADSM
KGRFTISRDNAKNTVYLQMNSLKPEDTAVYYCAADPWTSDSDYDRLTMYDYWGQGTQVTVSS;
(SEQ ID NO: 436)
QVQLQESGGGLVQAGGSLRLSCAASGRTFGTYTMGWFRQAPGKGREFVAAISWSAGRTYYADSM
KGRFTISRDNAKNTVYLQMNSLKPEDTAVYYCAADPWTSDSDYDRLTMYDYWGQGTQVTVSS;
(SEQ ID NO: 437)
QVQLVESGGGLVQAGGSLRLSCAASGRTFGSYTMGWFRQAPGKEREFVAAISWSAGRTYYADSM
KGRFTISRDNAKNTVYLQMNSLKPEDTAVYYCAADPWTSDSDYDRLTMYDYWGQGTQVTVSS;
(SEQ ID NO: 438)
QVQLVESGGGLVQAGGSLRLSCAASGRTFGTYTMGWFRQAPGKEREFVAAISWSAGRTYYADSM
KGRFTISRDNAKNTVYLQMNSLKPEDTAVYYCAADPWTSDSDYDRLTMYDYWGQGTQVTVSS;
(SEQ ID NO: 439)
QVQLVESGGGLVQAGGSLRLSCAASGRTFGTYTMGWFRQAPGREREFVAAISWSAGRTYYADSM
KGRFTISRDNAKNTVYLQMNSLKPEDTAVYYCAADPWTSDSDYDRLTMYDYWGQGTQVTVSS;
(SEQ ID NO: 440)
EVQLVESGGGLVQAGGSLRLSCAASGGTVSSYAMGWFRQAPGKEREFVAVISWSGGRTYYADSV
KGRFTISRDNAKNTVNLQMNSLKPEDTAVYYCAADPWTSDSDYERLTMYDYWGQGTQVTVSS;
(SEQ ID NO: 441)
EVQLVESGGGLVQAGGSRRLSCAASGGTVSSYAMGWFRQAPGKEREFVAVISWSGGRTYYADSV
KGRFTISRDNAKNTVYLQMNSLKPEDTAVYYCAADPWTSDSDYERLTMYDYWGQGTQVTVSS;
(SEQ ID NO: 442)
QVQLVESGGGLVQAGGSLRLSCAASGGTVSSYAMGWFRQAPGKEREFVAVISWSGGRTYYADSV
KGRFTISRDNAKNTVNLQMNSLKPEDTAVYYCAADPWTSDSDYERLTMYDYWGQGTQVTVSS;
(SEQ ID NO: 443)
QVQLVESGGGLVQAGGSLRLSCAASGGTVSSYAMGWFRQAPGKEREFVAVISWSGGRTYYADSV
KGRFTISRDNAKNTVYLQMNSLKPEDTAVYYCAADPWTSDSDYERLTMYDYWGQGTQVTVSS;
(SEQ ID NO: 444)
EVQLVESGGGLVQAGASLRLSCAASGRTTYNMGWFRHAPGKDREFVAAIDLYGRATRYANSVKG
RFTISRDNAKNTVYLQMNSLKPEDTAVYYCAADTSLPLGVLTESQRLYGAWGQGTQVTVSS;
(SEQ ID NO: 445)
QVQLQESGGGLVQAGASLRLSCAASGRATYNMGWFRHAPGEDREFVAAINLEGYATRYANSVKG
RFTISRDNAKNTVYLQMNSLKPEDTAVYYCAADTSLPLGVLTESQRLYGAWGQGTQVTVSS;
(SEQ ID NO: 446)
QVQLQESGGGLVQAGASLRLSCAASGRTTYNMGWFRHAPGKDREFVAAIDLYGRATRYANSVKG
RFTISRDNAKNTVYLQMNSLKPEDTAVYYCAADTSLPLGVLTESQRLYGAWGQGTQVTVSS;
(SEQ ID NO: 447)
QVQLQESGGGLVQAGASLRLSCAASGRTTYNMGWFRHAPGKDREFVAAIDLYGRATRYANSVRG
RFTISRDNAKNTVYLQMNSLKPEDTAVYYCAADTSLPLGVLTESQRLYGAWGQGTQVTVSS;
(SEQ ID NO: 448)
QVQLVESGGGLVQAGASLRLSCAASGRTTYNMGWFRHAPGKDREFVAAIDLYGRATRYANSVKG
RFTISRDNAKNTVYLQMNSLKPEDTAVYYCAADTSLPLGVLTESQRLYGAWGQGTQVTVSS;
(SEQ ID NO: 449)
QVQLVESGGGLVQAGASLRLSCAASGRTTYNMGWFRHAPGKDREFVAAIDLYGRATRYANSVKG
RFTISRDNAKNTVYLQMNSLKPEDTAVYYCAADTSLPLGVLTKSQRMYGAWGQGTQVTVSS;
  (SEQ ID NO: 450)
QVQLQESGGGSVQAGGSLRLSCAASGRAFSAYAMGWFRQAPGKEREFVAAINWNGDTALRWNGF
ATRYADSVKGRFIISRVNAKNTVNLQMNSLKPEDTAVYYCAADTVVSGSYYLAARAEDYEYWGQ
GTQVSVSS;
  (SEQ ID NO: 451)
QVQLQESGGGSVQAGGSLRLSCAASGRAFSAYAMGWFRQAPGKEREFVAAINWNGDTALRWNGF
ATRYADSVKGRFTISRVIAKNTVNLQMNSLKPEDTAVYYCAADTVVSGSYYLAARAEDYEYWGQ
GTQVTVSS;
  (SEQ ID NO: 452)
QVQLQESGGGSVQAGGSLRLSCAASGRAFSAYAMGWFRQAPGKEREFVAAINWNGDTALRWNGF
ATRYADSVKGRFTISRVNAKNTVNLQMNSLKPEDTAVYYCAADTVVSGSYYLAARAEDYEYWGQ
GTQVSVSS;
  (SEQ ID NO: 453)
QVQLQESGGGSVQAGGSLRLSCAASGRAFSAYAMGWFRQAPGKEREFVAAINWNGDTALRWNGF
ATRYADSVKGRFTISRVNAKNTVNLQMNSLKPEDTAVYYCAADTVVSGSYYLAARAEDYEYWGQ
GTQVTVSS;
  (SEQ ID NO: 454)
EVQLVESGGGLVQAGGSLRLSCAASGPAFSSSGMGWFRQAPGKARDFVASMDWSGGSTYYGDSV
KGRFTVSRDNAKNTVHLQMNSLRPEDTAVYYCARGTSGVAAVNLRGFFSWGPGTQVTVSS;
(SEQ ID NO: 455)
QVQLQESGGGLVQAGGSLRLSCAASGPAFSSSGMGWFRQAPGKARDFVASIDWSGGSTYYGDSV
KGRFTVSRDNAKNTVHLQMNSLRPEDTAVYYCARGTSGVAAVNLRGFFSWGPGTQVTVSS;
  (SEQ ID NO: 456)
QVQLVESGGGLVQAGGSLRLACAASGAAFSSSGMGWFRQAPGKARDFVASMDWSGGSTYYGDSV
KGRFTVSRDNAKNTVHLQMNSLRPEDTAVYYCARGTSGVAAVNLRGFFSWGPGTQVTVSS;
(SEQ ID NO: 457)
QVQLVESGGGLVQAGGSLRLSCAASGPAFSSSGMGWFRQAPGKARDFVASIDWGGGSTYYGDSV
KGRFTVSRDNAKNAVHLQMNSLRPEDTAVYYCARGTSGVAAVNLRGFFSWGPGTQVTVSS;
  (SEQ ID NO: 458)
QVQLVESGGGLVQAGGSLRLSCAASGPAFSSSGMGWFRQAPGKARDFVASIDWSGGSTYYGDSV
KGRFTVSRDNAKNTVHLQMNSLRPEDTAVYYCARGTSGVAAVNLRGFFSWGPGTQVTVSS;
  (SEQ ID NO: 459)
QVQLVESGGGLVQAGGSLRLSCAASGPAFSSSGMGWFRQAPGKARDFVASIDWSGKSTYYGDSV
KGRFTVSRDNAKNTVHLQMNSLRPEDTAVYYCARGTSGVAAVNLRGFFSWGPGTQVTVSS;
  (SEQ ID NO: 460)
QVQLVESGGGLVQAGGSLRLSCAASGPAFSSSGMGWFRQAPGKARDFVASINWSGGSAYYGDSV
KGRFTVSRDNAKNTVHLQMNSLRPEDTAVYYCARGTSGVAAVNLRGFFSWGPGTQVTVSS;
  (SEQ ID NO: 461)
QVQLVESGGGLVQAGGSLRLSCAASGPAFSSSGMGWFRQAPGKARDFVASMDWSGGSTYYGDSV
KGRFTVSRDNAKNTVHLQMNSLRPEDTAVYYCARGTSGVAAVNLRGFFSWGPGTQVTVSS;
  (SEQ ID NO: 462)
QVQLVESGGGLVQAGGSLRLSCAASGPAFSSSGMGWFRQAPGKAREFVASMDWTGGSTYYGDSV
KGRFTVSRDNAKMTVHLQMNSLRPEDTAVYYCARGTSGVAAVNLRGFFSWGPGTQVTVSS;
(SEQ ID NO: 463)
QLQLVESGGGLVQPGGSLRLSCAASGSDFLVDATTWFRQAPGNQREFVAIMDIGGVTEYADSVK
GRFTISRDHTKNTVYLQMNSLKVEDTAVYYCNTRGLWGQGTLVTVSS;
  (SEQ ID NO: 464)
QVQLQESGGGLVQAGGSLRLSCATSGITSSINVIGWYRQAPGKQRELVALVNSGGQTHYADSVK
GRFTISRDNAKNTVFLQMNSLKPEDTAEYYCHGRYGIDNYWGEGTQVTVSS;
  (SEQ ID NO: 465)
EVQLVESGGGLVQPGGSLRLSCAASGFPFSSSFMSWVRQAPGKGLEWVSTIYSDGSTYYADSVK
GRFTISRDNAKKTAYLQMNSLKAEDTAVYYCATVTGSIRGQGTQVTVSS;
  (SEQ ID NO: 466)
QVQLVESGGGLVQPGGSLRLSCAASGFNFSSSFMSWVRQAPGKEVEWVSTIYSDGSTYYADSMK
GRFTISRDNAKNTVYLQMSNLKAEDTAVYYCATVTGSIRGQGTQVTVSS;
  (SEQ ID NO: 467)
QVQLVESGGGLVQPGGSVRLSCATSGSIFSTNVMGWYRQAPGKEREFVALIRGGGSTHYADSVK
GRFIISRENAKTTVYLQMNGLKPEDTAVYYCVIWLGSPGAMSDYWGQGTQVTVSS;
  (SEQ ID NO: 468)
EVQLVESGGGLVQPGGSLRLSCAASGSVVSTNNMGWYRQAPGKEREFVALIRTGGSTHVADSMK
GRFTISRENAKNTVYLQMNSLKPEDTAVYYCVIWTGSPGALSDYWGQGTQVTVSS;
  (SEQ ID NO: 469)
QVQLVESGGGLVQPGGSLRLSCAASGSDASTNNMAWYRQAPGKEREFVALIRTGGSTHVADSMK
GRFTISRENAKNTVYLQMNSLKPEDTAVYYCVIWTGSPGALSDYWGQGTQVTVSS;
(SEQ ID NO: 470
QLQLVESGGGLVQPGESLRLSCAASGFSFSRVAMNWYRQAPGKERELVATISSDGSRTNYAHSV
KGRFTISRENAKNMVYLQMNSLKLEDTAVYYCNVPGNSWGQGTQVTVSS);
  (SEQ ID NO: 471)
QLQLVESGGGLVQPGESLRLSCAASGFSFSRVGMNWYRQAPGKERELVASISSDGSRTNYAHFV
KGRFTISRDNVKNMVYLQMNSLKLEDTAVYYCNVPGNSWGQGTQVTVSS;
  (SEQ ID NO: 472)
QLQLVESGGGLVQPGESLRLSCVVSGDIFSFVGWGWYRQAPGKQREVVAQISTGGLTNYADSVK
GRFAISRDNAKRTVYLQMNSLKFEDTAVYYCNVPGHPWGQGTQVTVSS;
  (SEQ ID NO: 473)
QVQLVESGGGLVQPGESLRLSCVVSGDIFSFIGWGWYRQAPGKQRELVAQINTGGLTDYADSVK
GRFTISRDNAKRTVYLQMNSLKFEDTAVYYCNFPGHSWGQGTQVTVSS;
  (SEQ ID NO: 474)
QVQLVESGGGLVQPGGSLRLSCAASGFTFSMYSMSWVRQAPGKRLEWVSSISTGARDTAYADSV
KGRFTISRDNADNTLYLHMNNLKPEDTAVYYCANGDLRYGPDGYDYRGQGTQVTVSS;
  (SEQ ID NO: 475)
QVQLVESGGGLVQPGGSLRLSCAASGFTFSMYSMSWVRQAPGKRLEWVSSISTGARDTAYADSV
KGRFTISRDNADNTLYLHMNNLKPEDTAVYYCANGDLRYGPDGYDYRGQGTQVTVVS;
  (SEQ ID NO: 476)
QVQLVESGGGLVQPGGSLRLSCAASGFTFSMYSMSWVRQAPGKRLEWVSSISTGARDTSYADSV
KGRFTISRDNADNTLYLHMNNLKPEDTAVYYCANGDLRYGPDGYDYRGQGTQVTVSS;
and
(SEQ ID NO: 477)
QVQLVESGGGLVQPGGSLRLSCVASGGTFSTYGMGWFRQAPGKEREFVAVITGSGVGTQYADSV
KDRFTISRENAKNTVYLQMNTLKLEDTAVYYCVSGHRPGWAVIRADAYEYWGQGTQVTVSS.
```

7. The VHH antibody of claim 1, wherein the VHH antibody comprises an amino acid sequence selected from the group consisting of:
```
  (SEQ ID NO: 431)
QVQLVESGGGLVQPGGSLRLSCAASGRTFINYAAGWFRQAPGKEREFVARISRSGGRTDYADSV
KGRFTISRDNAKSTVYLQMNSLRPEDTAVYYCAEATVWEFTDGADQYDYWGQGTQVTVSS;
(SEQ ID NO: 432)
EVQLVESGGGLVQAGGSLRLSCAASGRTFGSYTMGWFRQAPGKEREFVAAISWSAGRTYYADSM
KGRFTISRDNAKNTVYLQMNSLKPEDTAVYYCAADPWTSDSDYDRLTMYDYWGQGTQVTVSS;
(SEQ ID NO: 433)
EVQLVESGGGLVQAGGSLRLSCAASGRTFGTYTMGWFRQAPGKEREFVAAISWSAGRTYYADSM
KGRFTISRDNAKNTVYLQMNSLKPEDTAVYYCAADPWTSDSDYDRLTMYDYWGQGTQVTVSS;
(SEQ ID NO: 434)
QVQLQESGGGLVQAGGSLRLSCAASGRTFGSYTMGWFRQAPGKEREFVAAISWSAGRTYYADSM
KGRFTISRDNAKNTVYLQMNSLKPEDTAVYYCAADPWTSDSDYDRLTMYDYWGQGTQVTVSS;
(SEQ ID NO: 435)
QVQLQESGGGLVQAGGSLRLSCAASGRTFGTYTMGWFRQAPGKEREFVAAISWSAGRTYYADSM
KGRFTISRDNAKNTVYLQMNSLKPEDTAVYYCAADPWTSDSDYDRLTMYDYWGQGTQVTVSS;
(SEQ ID NO: 436)
QVQLQESGGGLVQAGGSLRLSCAASGRTFGTYTMGWFRQAPGKGREFVAAISWSAGRTYYADSM
KGRFTISRDNAKNTVYLQMNSLKPEDTAVYYCAADPWTSDSDYDRLTMYDYWGQGTQVTVSS;
(SEQ ID NO: 437)
QVQLVESGGGLVQAGGSLRLSCAASGRTFGSYTMGWFRQAPGKEREFVAAISWSAGRTYYADSM
KGRFTISRDNAKNTVYLQMNSLKPEDTAVYYCAADPWTSDSDYDRLTMYDYWGQGTQVTVSS;
(SEQ ID NO: 438)
QVQLVESGGGLVQAGGSLRLSCAASGRTFGTYTMGWFRQAPGKEREFVAAISWSAGRTYYADSM
KGRFTISRDNAKNTVYLQMNSLKPEDTAVYYCAADPWTSDSDYDRLTMYDYWGQGTQVTVSS;
(SEQ ID NO: 439)
QVQLVESGGGLVQAGGSLRLSCAASGRTFGTYTMGWFRQAPGREREFVAAISWSAGRTYYADSM
KGRFTISRDNAKNTVYLQMNSLKPEDTAVYYCAADPWTSDSDYDRLTMYDYWGQGTQVTVSS;
(SEQ ID NO: 440)
EVQLVESGGGLVQAGGSLRLSCAASGGTVSSYAMGWFRQAPGKEREFVAVISWSGGRTYYADSV
KGRFTISRDNAKNTVNLQMNSLKPEDTAVYYCAADPWTSDSDYERLTMYDYWGQGTQVTVSS;
(SEQ ID NO: 441)
EVQLVESGGGLVQAGGSRRLSCAASGGTVSSYAMGWFRQAPGKEREFVAVISWSGGRTYYADSV
KGRFTISRDNAKNTVYLQMNSLKPEDTAVYYCAADPWTSDSDYERLTMYDYWGQGTQVTVSS;
(SEQ ID NO: 442)
QVQLVESGGGLVQAGGSLRLSCAASGGTVSSYAMGWFRQAPGKEREFVAVISWSGGRTYYADSV
KGRFTISRDNAKNTVNLQMNSLKPEDTAVYYCAADPWTSDSDYERLTMYDYWGQGTQVTVSS;
(SEQ ID NO: 443)
QVQLVESGGGLVQAGGSLRLSCAASGGTVSSYAMGWFRQAPGKEREFVAVISWSGGRTYYADSV
KGRFTISRDNAKNTVYLQMNSLKPEDTAVYYCAADPWTSDSDYERLTMYDYWGQGTQVTVSS;
(SEQ ID NO: 444)
EVQLVESGGGLVQAGASLRLSCAASGRTTYNMGWFRHAPGKDREFVAAIDLYGRATRYANSVKG
RFTISRDNAKNTVYLQMNSLKPEDTAVYYCAADTSLPLGVLTESQRLYGAWGQGTQVTVSS;
(SEQ ID NO: 445)
QVQLQESGGGLVQAGASLRLSCAASGRATYNMGWFRHAPGEDREFVAAINLEGYATRYANSVKG
RFTISRDNAKNTVYLQMNSLKPEDTAVYYCAADTSLPLGVLTESQRLYGAWGQGTQVTVSS;
(SEQ ID NO: 446)
QVQLQESGGGLVQAGASLRLSCAASGRTTYNMGWFRHAPGKDREFVAAIDLYGRATRYANSVKG
RFTISRDNAKNTVYLQMNSLKPEDTAVYYCAADTSLPLGVLTESQRLYGAWGQGTQVTVSS;
(SEQ ID NO: 447)
QVQLQESGGGLVQAGASLRLSCAASGRTTYNMGWFRHAPGKDREFVAAIDLYGRATRYANSVRG
RFTISRDNAKNTVYLQMNSLKPEDTAVYYCAADTSLPLGVLTESQRLYGAWGQGTQVTVSS;
(SEQ ID NO: 448)
QVQLVESGGGLVQAGASLRLSCAASGRTTYNMGWFRHAPGKDREFVAAIDLYGRATRYANSVKG
RFTISRDNAKNTVYLQMNSLKPEDTAVYYCAADTSLPLGVLTESQRLYGAWGQGTQVTVSS;
(SEQ ID NO: 449)
QVQLVESGGGLVQAGASLRLSCAASGRTTYNMGWFRHAPGKDREFVAAIDLYGRATRYANSVKG
RFTISRDNAKNTVYLQMNSLKPEDTAVYYCAADTSLPLGVLTKSQRMYGAWGQGTQVTVSS;
  (SEQ ID NO: 450)
QVQLQESGGGSVQAGGSLRLSCAASGRAFSAYAMGWFRQAPGKEREFVAAINWNGDTALRWNGF
ATRYADSVKGRFIISRVNAKNTVNLQMNSLKPEDTAVYYCAADTVVSGSYYLAARAEDYEYWGQ
GTQVSVSS;
  (SEQ ID NO: 451)
QVQLQESGGGSVQAGGSLRLSCAASGRAFSAYAMGWFRQAPGKEREFVAAINWNGDTALRWNGF
ATRYADSVKGRFTISRVIAKNTVNLQMNSLKPEDTAVYYCAADTVVSGSYYLAARAEDYEYWGQ
GTQVTVSS;
  (SEQ ID NO: 452)
QVQLQESGGGSVQAGGSLRLSCAASGRAFSAYAMGWFRQAPGKEREFVAAINWNGDTALRWNGF
ATRYADSVKGRFTISRVNAKNTVNLQMNSLKPEDTAVYYCAADTVVSGSYYLAARAEDYEYWGQ
GTQVSVSS;
  (SEQ ID NO: 453)
QVQLQESGGGSVQAGGSLRLSCAASGRAFSAYAMGWFRQAPGKEREFVAAINWNGDTALRWNGF
ATRYADSVKGRFTISRVNAKNTVNLQMNSLKPEDTAVYYCAADTVVSGSYYLAARAEDYEYWGQ
GTQVTVSS;
  (SEQ ID NO: 454)
EVQLVESGGGLVQAGGSLRLSCAASGPAFSSSGMGWFRQAPGKARDFVASMDWSGGSTYYGDSV
KGRFTVSRDNAKNTVHLQMNSLRPEDTAVYYCARGTSGVAAVNLRGFFSWGPGTQVTVSS;
  (SEQ ID NO: 455)
QVQLQESGGGLVQAGGSLRLSCAASGPAFSSSGMGWFRQAPGKARDFVASIDWSGGSTYYGDSV
KGRFTVSRDNAKNTVHLQMNSLRPEDTAVYYCARGTSGVAAVNLRGFFSWGPGTQVTVSS;
  (SEQ ID NO: 456)
QVQLVESGGGLVQAGGSLRLACAASGAAFSSSGMGWFRQAPGKARDFVASMDWSGGSTYYGDSV
KGRFTVSRDNAKNTVHLQMNSLRPEDTAVYYCARGTSGVAAVNLRGFFSWGPGTQVTVSS;
  (SEQ ID NO: 457)
QVQLVESGGGLVQAGGSLRLSCAASGPAFSSSGMGWFRQAPGKARDFVASIDWGGGSTYYGDSV
KGRFTVSRDNAKNAVHLQMNSLRPEDTAVYYCARGTSGVAAVNLRGFFSWGPGTQVTVSS;
  (SEQ ID NO: 458)
QVQLVESGGGLVQAGGSLRLSCAASGPAFSSSGMGWFRQAPGKARDFVASIDWSGGSTYYGDSV
KGRFTVSRDNAKNTVHLQMNSLRPEDTAVYYCARGTSGVAAVNLRGFFSWGPGTQVTVSS;
  (SEQ ID NO: 459)
QVQLVESGGGLVQAGGSLRLSCAASGPAFSSSGMGWFRQAPGKARDFVASIDWSGKSTYYGDSV
KGRFTVSRDNAKNTVHLQMNSLRPEDTAVYYCARGTSGVAAVNLRGFFSWGPGTQVTVSS;
  (SEQ ID NO: 460)
QVQLVESGGGLVQAGGSLRLSCAASGPAFSSSGMGWFRQAPGKARDFVASINWSGGSAYYGDSV
KGRFTVSRDNAKNTVHLQMNSLRPEDTAVYYCARGTSGVAAVNLRGFFSWGPGTQVTVSS;
  (SEQ ID NO: 461)
QVQLVESGGGLVQAGGSLRLSCAASGPAFSSSGMGWFRQAPGKARDFVASMDWSGGSTYYGDSV
KGRFTVSRDNAKNTVHLQMNSLRPEDTAVYYCARGTSGVAAVNLRGFFSWGPGTQVTVSS;
  (SEQ ID NO: 462)
QVQLVESGGGLVQAGGSLRLSCAASGPAFSSSGMGWFRQAPGKAREFVASMDWTGGSTYYGDSV
KGRFTVSRDNAKMTVHLQMNSLRPEDTAVYYCARGTSGVAAVNLRGFFSWGPGTQVTVSS;
  (SEQ ID NO: 463)
QLQLVESGGGLVQPGGSLRLSCAASGSDFLVDATTWFRQAPGNQREFVAIMDIGGVTEYADSVK
GRFTISRDHTKNTVYLQMNSLKVEDTAVYYCNTRGLWGQGTLVTVSS;
  (SEQ ID NO: 464)
QVQLQESGGGLVQAGGSLRLSCATSGITSSINVIGWYRQAPGKQRELVALVNSGGQTHYADSVK
GRFTISRDNAKNTVFLQMNSLKPEDTAEYYCHGRYGIDNYWGEGTQVTVSS;
  (SEQ ID NO: 465)
EVQLVESGGGLVQPGGSLRLSCAASGFPFSSSFMSWVRQAPGKGLEWVSTIYSDGSTYYADSVK
GRFTISRDNAKKTAYLQMNSLKAEDTAVYYCATVTGSIRGQGTQVTVSS;
  (SEQ ID NO: 466)
QVQLVESGGGLVQPGGSLRLSCAASGFNFSSSFMSWVRQAPGKEVEWVSTIYSDGSTYYADSMK
GRFTISRDNAKNTVYLQMSNLKAEDTAVYYCATVTGSIRGQGTQVTVSS;
  (SEQ ID NO: 467)
QVQLVESGGGLVQPGGSVRLSCATSGSIFSTNVMGWYRQAPGKEREFVALIRGGGSTHYADSVK
GRFIISRENAKTTVYLQMNGLKPEDTAVYYCVIWLGSPGAMSDYWGQGTQVTVSS;
  (SEQ ID NO: 468)
EVQLVESGGGLVQPGGSLRLSCAASGSVVSTNNMGWYRQAPGKEREFVALIRTGGSTHVADSMK
GRFTISRENAKNTVYLQMNSLKPEDTAVYYCVIWTGSPGALSDYWGQGTQVTVSS;
  (SEQ ID NO: 469)
QVQLVESGGGLVQPGGSLRLSCAASGSDASTNNMAWYRQAPGKEREFVALIRTGGSTHVADSMK
GRFTISRENAKNTVYLQMNSLKPEDTAVYYCVIWTGSPGALSDYWGQGTQVTVSS;
  (SEQ ID NO: 470)
QLQLVESGGGLVQPGESLRLSCAASGFSFSRVAMNWYRQAPGKERELVATISSDGSRTNYAHSV
KGRFTISRENAKNMVYLQMNSLKLEDTAVYYCNVPGNSWGQGTQVTVSS;
  (SEQ ID NO: 471)
QLQLVESGGGLVQPGESLRLSCAASGFSFSRVGMNWYRQAPGKERELVASISSDGSRTNYAHFV
KGRFTISRDNVKNMVYLQMNSLKLEDTAVYYCNVPGNSWGQGTQVTVSS;
  (SEQ ID NO: 472)
QLQLVESGGGLVQPGESLRLSCVVSGDIFSFVGWGWYRQAPGKQREVVAQISTGGLTNYADSVK
GRFAISRDNAKRTVYLQMNSLKFEDTAVYYCNVPGHPWGQGTQVTVSS;
  (SEQ ID NO: 473)
QVQLVESGGGLVQPGESLRLSCVVSGDIFSFIGWGWYRQAPGKQRELVAQINTGGLTDYADSVK
GRFTISRDNAKRTVYLQMNSLKFEDTAVYYCNFPGHSWGQGTQVTVSS;
  (SEQ ID NO: 474)
QVQLVESGGGLVQPGGSLRLSCAASGFTFSMYSMSWVRQAPGKRLEWVSSISTGARDTAYADSV
KGRFTISRDNADNTLYLHMNNLKPEDTAVYYCANGDLRYGPDGYDYRGQGTQVTVSS;
  (SEQ ID NO: 475)
QVQLVESGGGLVQPGGSLRLSCAASGFTFSMYSMSWVRQAPGKRLEWVSSISTGARDTAYADSV
KGRFTISRDNADNTLYLHMNNLKPEDTAVYYCANGDLRYGPDGYDYRGQGTQVTVVS;
  (SEQ ID NO: 476)
QVQLVESGGGLVQPGGSLRLSCAASGFTFSMYSMSWVRQAPGKRLEWVSSISTGARDTSYADSV
KGRFTISRDNADNTLYLHMNNLKPEDTAVYYCANGDLRYGPDGYDYRGQGTQVTVSS;
and
(SEQ ID NO: 477)
QVQLVESGGGLVQPGGSLRLSCVASGGTFSTYGMGWFRQAPGKEREFVAVITGSGVGTQYADSV
KDRFTISRENAKNTVYLQMNTLKLEDTAVYYCVSGHRPGWAVIRADAYEYWGQGTQVTVSS.
```

8. A chimeric antigen receptor polypeptide comprising the VHH antibody of claim 1, or an antigen-binding fragment thereof.

9. An immunoconjugate comprising the VHH antibody of claim 1.

10. A polynucleotide encoding the VHH antibody of claim 1.

11. A vector comprising the polynucleotide of claim 10.

12. A cell expressing the VHH antibody of claim 1.

13. A lipid nanoparticle comprising the VHH antibody of claim 1.

14. The lipid nanoparticle of claim 13, wherein the lipid nanoparticle is conjugated to the VHH antibody.

15. The lipid nanoparticle of claim 14, wherein the VHH antibody is covalently bound to a polyethylene glycol (PEG) molecule of the lipid nanoparticle.

16. The lipid nanoparticle of claim 14, wherein the VHH antibody is covalently bound to a PEG portion of a PEG-modified lipid of the lipid nanoparticle.

17. The lipid nanoparticle of claim 13, wherein the lipid nanoparticle comprises a polynucleotide encoding a chimeric antigen receptor.

18. The lipid nanoparticle of claim 13, wherein the chimeric antigen receptor comprises an antigen binding domain capable of binding a marker associated with a neoplasia.

19. A composition comprising the VHH antibody of claim 1, and a carrier or excipient.

20. A method for treating a neoplasia in a subject in need thereof, the method comprising administering to the subject the lipid nanoparticle of claim 17.

21. The method of claim 20, wherein the neoplasia is a B cell lymphoma or a T cell lymphoma.
